(19) United States
(12) Patent Application Publication
(10) Pub. No.: US 2009/0186378 A1
(43) Pub. Date: Jul. 23, 2009

(54) Polynucleotides encoding the fkbB gene of the FK-520 polyketide synthase gene cluster

(75) Inventors: Christopher Reeves, Orinda, CA (US); Daniel Chu, Santa Clara, CA (US); Chaitan Khosla, Palo Alto, CA (US); Daniel Santi, San Francisco, CA (US); Kai Wu, Foster City, CA (US)

Correspondence Address: MORRISON & FOERSTER LLP, 12531 HIGH BLUFF DRIVE, SUITE 100, SAN DIEGO, CA, 92130-2040, US

(73) Assignee: Kosan Biosciences

(21) Appl. No.: 10/885,305

(22) Filed: Jul. 6, 2004

Related U.S. Application Data
(62) Division of application No. 09/940,316, filed on Aug. 27, 2001, now Pat. No. 6,759,536.
Application No. 09/940,316 is a division of application No. 09/410,551, filed on Oct. 1, 1999, now Pat. No. 6,503,737.
(60) Provisional application No. 60/102,748, filed on Oct. 2, 1998.
(60) Provisional application No. 60/139,650, filed on Jun. 17, 1999.
(60) Provisional application No. 60/123,810, filed on Mar. 11, 1999.

(51) Int. Cl. C12P 21/04; C12N 15/11; C12P 17/16; C12N 1/21; C12N 15/00

(52) U.S. Cl. 435/69.1; 536/23.1; 435/320.1; 435/118; 435/252.35

(57) ABSTRACT

Host cells comprising recombinant vectors encoding the FK-520 polyketide synthase and FK-520 modification enzymes can be used to produce the FK-520 polyketide. Recombinant DNA constructs comprising one or more FK-520 polyketide synthase domains, modules, open reading frames, and variants thereof can be used to produce recombinant polyketide synthases and a variety of different polyketides with application as pharmaceutical and veterinary products.

### CROSS-REFERENCE TO RELATED APPLICATIONS

[0001] The present application is a divisional of U.S. patent application Ser. No. 09/940,316, filed 27 Aug. 2001, which is a divisional of U.S. patent application Ser. No. 09/410,551, filed 1 Oct. 1999, which claims the benefit of the filing date of U.S. provisional patent application Ser. Nos. 60/102,748, filed 2 Oct. 1998, 60/139,650, filed 17 Jun. 1999, and 60/123,810, filed 11 Mar. 1999, each of which is incorporated herein by reference.

### Submission On Compact Disc

[0002] The contents of the following submission on compact discs are incorporated herein by reference in their entirety: A compact disc copy of the Sequence Listing (COPY 1) (file name: 300622002612, date recorded: Jul. 1, 2004, size: 624,640 bytes); and a duplicate compact disc copy of the Sequence Listing (COPY 2) (file name: 300622002612, date recorded: Jul. 1, 2004, size: 624,640 bytes).

### FIELD OF THE INVENTION

[0003] The present invention relates to polyketides and the polyketide synthase (PKS) enzymes that produce them. The invention also relates generally to genes encoding PKS enzymes and to recombinant host cells containing such genes and in which expression of such genes leads to the production of polyketides. The present invention also relates to compounds useful as medicaments having immunosuppressive and/or neurotrophic activity. Thus, the invention relates to the fields of chemistry, molecular biology, and agricultural, medical, and veterinary technology.

### BACKGROUND OF THE INVENTION

[0004] Polyketides are a class of compounds synthesized from 2-carbon units through a series of condensations and subsequent modifications. Polyketides occur in many types of organisms, including fungi and mycelial bacteria, in particular, the actinomycetes. Polyketides are biologically active molecules with a wide variety of structures, and the class encompasses numerous compounds with diverse activities. Tetracycline, erythromycin, epothilone, FK-506, FK-520, narbomycin, picromycin, rapamycin, spinocyn, and tylosin are examples of polyketides. Given the difficulty in producing polyketide compounds by traditional chemical methodology, and the typically low production of polyketides in wild-type cells, there has been considerable interest in finding improved or alternate means to produce polyketide compounds.

[0005] This interest has resulted in the cloning, analysis, and manipulation by recombinant DNA technology of genes that encode PKS enzymes. The resulting technology allows one to manipulate a known PKS gene cluster either to produce the polyketide synthesized by that PKS at higher levels than occur in nature or in hosts that otherwise do not produce the polyketide. The technology also allows one to produce molecules that are structurally related to, but distinct from, the polyketides produced from known PKS gene clusters. See, e.g., PCT publication Nos. WO 93/13663; 95/08548; 96/40968; 97/02358; 98/27203; and 98/49315; U.S. Pat. Nos. 4,874,748; 5,063,155; 5,098,837; 5,149,639; 5,672,491; 5,712,146; 5,830,750; and 5,843,718; and Fu et al., 1994, Biochemistry 33: 9321-9326; McDaniel et al., 1993, Science 262: 1546-1550; and Rohr, 1995, Angew. Chem. Int. Ed. Engl. 34(8): 881-888, each of which is incorporated herein by reference.

[0006] Polyketides are synthesized in nature by PKS enzymes. These enzymes, which are complexes of multiple large proteins, are similar to the synthases that catalyze condensation of 2-carbon units in the biosynthesis of fatty acids. PKSs catalyze the biosynthesis of polyketides through repeated, decarboxylative Claisen condensations between acylthioester building blocks. The building blocks used to form complex polyketides are typically acylthioesters, such as acetyl, butyryl, propionyl, malonyl, hydroxymalonyl, methylmalonyl, and ethylmalonyl CoA. Other building blocks include amino acid like acylthioesters. PKS enzymes that incorporate such building blocks include an activity that functions as an amino acid ligase (an AMP ligase) or as a non-ribosomal peptide synthetase (NRPS). Two major types of PKS enzymes are known; these differ in their composition and mode of synthesis of the polyketide synthesized. These two major types of PKS enzymes are commonly referred to as Type I or “modular” and Type II “iterative” PKS enzymes.

[0007] In the Type I or modular PKS enzyme group, a set of separate catalytic active sites (each active site is termed a “domain”, and a set thereof is termed a “module”) exists for each cycle of carbon chain elongation and modification in the polyketide synthesis pathway. The typical modular PKS is composed of several large polypeptides, which can be segregated from amino to carboxy termini into a loading module, multiple extender modules, and a releasing (or thioesterase) domain. The PKS enzyme known as 6-deoxyerythronolide B synthase (DEBS) is a Type I PKS. In DEBS, there is a loading module, six extender modules, and a thioesterase (TE) domain. The loading module, six extender modules, and TE of DEBS are present on three separate proteins (designated DEBS-1, DEBS-2, and DEBS-3, with two extender modules per protein). Each of the DEBS polypeptides is encoded by a separate open reading frame (ORF) or gene; these genes are known as eryAI, eryAII, and eryAIII. See Caffrey et al., 1992, FEBS Letters 304: 205, and U.S. Pat. No. 5,824,513, each of which is incorporated herein by reference.

[0008] Generally, the loading module is responsible for binding the first building block used to synthesize the polyketide and transferring it to the first extender module. The loading module of DEBS consists of an acyltransferase (AT) domain and an acyl carrier protein (ACP) domain. Another type of loading module utilizes an inactivated ketosynthase (KS) domain and AT and ACP domains. This inactivated KS is in some instances called KS^{Q}, where the superscript letter is the abbreviation for the amino acid, glutamine, that is present instead of the active site cysteine required for ketosynthase activity. In other PKS enzymes, including the FK-506 PKS, the loading module incorporates an unusual starter unit and is composed of a CoA ligase like activity domain. In any event, the loading module recognizes a particular acyl-CoA (usually acetyl or propionyl but sometimes butyryl or other acyl-CoA) and transfers it as a thiol ester to the ACP of the loading module.

[0009] The AT on each of the extender modules recognizes a particular extender-CoA (malonyl or alpha-substituted malonyl, i.e., methylmalonyl, ethylmalonyl, and 2-hydroxymalonyl) and transfers it to the ACP of that extender module to form a thioester. Each extender module is responsible for accepting a compound from a prior module, binding a building block, attaching the building block to the compound from the prior module, optionally performing one or more additional functions, and transferring the resulting compound to the next module.

[0010] Each extender module of a modular PKS contains a KS, AT, ACP, and zero, one, two, or three domains that modify the beta-carbon of the growing polyketide chain. A typical (non-loading) minimal Type I PKS extender module is exemplified by extender module three of DEBS, which contains a KS domain, an AT domain, and an ACP domain. These three domains are sufficient to activate a 2-carbon extender unit and attach it to the growing polyketide molecule. The next extender module, in turn, is responsible for attaching the next building block and transferring the growing compound to the next extender module until synthesis is complete.

[0011] Once the PKS is primed with acyl- and malonyl-ACPs, the acyl group of the loading module is transferred to form a thiol ester (trans-esterification) at the KS of the first extender module; at this stage, extender module one possesses an acyl-KS and a malonyl (or substituted malonyl) ACP. The acyl group derived from the loading module is then covalently attached to the alpha-carbon of the malonyl group to form a carbon-carbon bond, driven by concomitant decarboxylation, and generating a new acyl-ACP that has a backbone two carbons longer than the loading building block (elongation or extension).

[0012] The polyketide chain, growing by two carbons each extender module, is sequentially passed as covalently bound thiol esters from extender module to extender module, in an assembly line-like process. The carbon chain produced by this process alone would possess a ketone at every other carbon atom, producing a polyketone, from which the name polyketide arises. Most commonly, however, additional enzymatic activities modify the beta keto group of each two carbon unit just after it has been added to the growing polyketide chain but before it is transferred to the next module.

[0013] Thus, in addition to the minimal module containing KS, AT, and ACP domains necessary to form the carbon-carbon bond, and as noted above, other domains that modify the beta-carbonyl moiety can be present. Thus, modules may contain a ketoreductase (KR) domain that reduces the keto group to an alcohol. Modules may also contain a KR domain plus a dehydratase (DH) domain that dehydrates the alcohol to a double bond. Modules may also contain a KR domain, a DH domain, and an enoylreductase (ER) domain that converts the double bond product to a saturated single bond using the beta carbon as a methylene function. An extender module can also contain other enzymatic activities, such as, for example, a methylase or dimethylase activity.

[0014] After traversing the final extender module, the polyketide encounters a releasing domain that cleaves the polyketide from the PKS and typically cyclizes the polyketide. For example, final synthesis of 6-dEB is regulated by a TE domain located at the end of extender module six. In the synthesis of 6-dEB, the TE domain catalyzes cyclization of the macrolide ring by formation of an ester linkage. In FK-506, FK-520, rapamycin, and similar polyketides, the TE activity is replaced by a RapP (for rapamycin) or RapP like activity that makes a linkage incorporating a pipecolate acid residue. The enzymatic activity that catalyzes this incorporation for the rapamycin enzyme is known as RapP, encoded by the rapP gene. The polyketide can be modified further by tailoring enzymes; these enzymes add carbohydrate groups or methyl groups, or make other modifications, i.e., oxidation or reduction, on the polyketide core molecule. For example, 6-dEB is hydroxylated at C-6 and C-12 and glycosylated at C-3 and C-5 in the synthesis of erythromycin A.

[0015] In Type I PKS polypeptides, the order of catalytic domains is conserved. When all beta-keto processing domains are present in a module, the order of domains in that module from N-to-C-terminus is always KS, AT, DH, ER, KR, and ACP. Some or all of the beta-keto processing domains may be missing in particular modules, but the order of the domains present in a module remains the same. The order of domains within modules is believed to be important for proper folding of the PKS polypeptides into an active complex. Importantly, there is considerable flexibility in PKS enzymes, which allows for the genetic engineering of novel catalytic complexes. The engineering of these enzymes is achieved by modifying, adding, or deleting domains, or replacing them with those taken from other Type I PKS enzymes. It is also achieved by deleting, replacing, or adding entire modules with those taken from other sources. A genetically engineered PKS complex should of course have the ability to catalyze the synthesis of the product predicted from the genetic alterations made.

[0016] Alignments of the many available amino acid sequences for Type I PKS enzymes has approximately defined the boundaries of the various catalytic domains. Sequence alignments also have revealed linker regions between the catalytic domains and at the N- and C-termini of individual polypeptides. The sequences of these linker regions are less well conserved than are those for the catalytic domains, which is in part how linker regions are identified. Linker regions can be important for proper association between domains and between the individual polypeptides that comprise the PKS complex. One can thus view the linkers and domains together as creating a scaffold on which the domains and modules are positioned in the correct orientation to be active. This organization and positioning, if retained, permits PKS domains of different or identical substrate specificities to be substituted (usually at the DNA level) between PKS enzymes by various available methodologies. In selecting the boundaries of, for example, an AT replacement, one can thus make the replacement so as to retain the linkers of the recipient PKS or to replace them with the linkers of the donor PKS AT domain, or, preferably, make both constructs to ensure that the correct linker regions between the KS and AT domains have been included in at least one of the engineered enzymes. Thus, there is considerable flexibility in the design of new PKS enzymes with the result that known polyketides can be produced more effectively, and novel polyketides useful as pharmaceuticals or for other purposes can be made.

[0017] By appropriate application of recombinant DNA technology, a wide variety of polyketides can be prepared in a variety of different host cells provided one has access to nucleic acid compounds that encode PKS proteins and polyketide modification enzymes. The present invention helps meet the need for such nucleic acid compounds by providing recombinant vectors that encode the FK-520 PKS enzyme and various FK-520 modification enzymes. Moreover, while the FK-506 and FK-520 polyketides have many useful activities, there remains a need for compounds with similar useful activities but with better pharmacokinetic profile and metabolism and fewer side-effects. The present invention helps meet the need for such compounds as well.

### SUMMARY OF THE INVENTION

[0018] In one embodiment, the present invention provides recombinant DNA vectors that encode all or part of the FK-520 PKS enzyme. Illustrative vectors of the invention include cosmid pKOS034-120, pKOS034-124, pKOS065-C31, pKOS065-C3, pKOS065-M27, and pKOS165-M21. The invention also provides nucleic acid compounds that encode the various domains of the FK-520 PKS, i.e., the KS, AT, ACP, KR, DH, and ER domains. These compounds can be readily used, alone or in combination with nucleic acids encoding other FK-520 or non-FK-520 PKS domains, as intermediates in the construction of recombinant vectors that encode all or part of PKS enzymes that make novel polyketides.

[0019] The invention also provides isolated nucleic acids that encode all or part of one or more modules of the FK-520 PKS, each module comprising a ketosynthase activity, an acyl transferase activity, and an acyl carrier protein activity. The invention provides an isolated nucleic acid that encodes one or more open reading frames of FK-520 PKS genes, said open reading frames comprising coding sequences for a CoA ligase activity, an NRPS activity, or two or more extender modules. The invention also provides recombinant expression vectors containing these nucleic acids.

[0020] In another embodiment, the invention provides isolated nucleic acids that encode all or a part of a PKS that contains at least one module in which at least one of the domains in the module is a domain from a non-FK-520 PKS and at least one domain is from the FK-520 PKS. The non-FK-520 PKS domain or module originates from the rapamycin PKS, the FK-506 PKS, DEBS, or another PKS. The invention also provides recombinant expression vectors containing these nucleic acids.

[0021] In another embodiment, the invention provides a method of preparing a polyketide, said method comprising transforming a host cell with a recombinant DNA vector that encodes at least one module of a PKS, said module comprising at least one FK-520 PKS domain, and culturing said host cell under conditions such that said PKS is produced and catalyzes synthesis of said polyketide. In one aspect, the method is practiced with a Streptomyces host cell. In another aspect, the polyketide produced is FK-520. In another aspect, the polyketide produced is a polyketide related in structure to FK-520. In another aspect, the polyketide produced is a polyketide related in structure to FK-506 or rapamycin.

[0022] In another embodiment, the invention provides a set of genes in recombinant form sufficient for the synthesis of ethylmalonyl CoA in a heterologous host cell. These genes and the methods of the invention enable one to create recombinant host cells with the ability to produce polyketides or other compounds that require ethylmalonyl CoA for biosynthesis. The invention also provides recombinant nucleic acids that encode AT domains specific for ethylmalonyl CoA. Thus, the compounds of the invention can be used to produce polyketides requiring ethylmalonyl CoA in host cells that otherwise are unable to produce such polyketides.

[0023] In another embodiment, the invention provides a set of genes in recombinant form sufficient for the synthesis of 2-hydroxymalonyl CoA and 2-methoxymalonyl CoA in a heterologous host cell. These genes and the methods of the invention enable one to create recombinant host cells with the ability to produce polyketides or other compounds that require 2-hydroxymalonyl CoA for biosynthesis. The invention also provides recombinant nucleic acids that encode AT domains specific for 2-hydroxymalonyl CoA and 2-methoxymalonyl CoA. Thus, the compounds of the invention can be used to produce polyketides requiring 2-hydroxymalonyl CoA or 2-methoxymalonyl CoA in host cells that are otherwise unable to produce such polyketides.

[0024] In another embodiment, the invention provides a compound related in structure to FK-520 or FK-506 that is useful in the treatment of a medical condition. These compounds include compounds in which the C-13 methoxy group is replaced by a moiety selected from the group consisting of hydrogen, methyl, and ethyl moieties. Such compounds are less susceptible to the main in vivo pathway of degradation for FK-520 and FK-506 and related compounds and thus exhibit an improved pharmacokinetic profile. The compounds of the invention also include compounds in which the C-15 methoxy group is replaced by a moiety selected from the group consisting of hydrogen, methyl, and ethyl moieties. The compounds of the invention also include the above compounds further modified by chemical methodology to produce derivatives such as, but not limited to, the C-18 hydroxyl derivatives, which have potent neurotrophin but not immunosuppresion activities.

[0025] Thus, the invention provides polyketides having the structure:

[chemical structure]

[0026] wherein, R₁ is hydrogen, methyl, ethyl, or allyl; R₂ is hydrogen or hydroxyl, provided that when R₂ is hydrogen, there is a double bond between C-20 and C-19; R₃ is hydrogen or hydroxyl; R₄ is methoxyl, hydrogen, methyl, or ethyl; and R₅ is methoxyl, hydrogen, methyl, or ethyl; but not including FK-506, FK-520, 18-hydroxy-FK-520, and 18-hydroxy-FK-506. The invention provides these compounds in purified form and in pharmaceutical compositions.

[0027] In another embodiment, the invention provides a method for treating a medical condition by administering a pharmaceutically efficacious dose of a compound of the invention.

[0028] The compounds of the invention may be administered to achieve immunosuppression or to stimulate nerve growth and regeneration.

[0029] These and other embodiments and aspects of the invention will be more fully understood after consideration of the attached Drawings and their brief description below, together with the detailed description, examples, and claims that follow.

### BRIEF DESCRIPTION OF THE DRAWINGS

[0030] FIG. 1 shows a diagram of the FK-520 biosynthetic gene cluster. The top line provides a scale in kilobase pairs (kb). The second line shows a restriction map with selected restriction enzyme recognition sequences indicated. K is KpnI; X is XhoI, S is SacI; P is PstI; and E is EcoRI. The third line indicates the position of FK-520 PKS and related genes. Genes are abbreviated with a one letter designation, i.e., C is fkbC. Immediately under the third line are numbered segments showing where the loading module (L) and ten different extender modules (numbered 1-10) are encoded on the various genes shown. At the bottom of the Figure, the DNA inserts of various cosmids of the invention (i.e., 34-124 is cosmid pKOS034-124) are shown in alignment with the FK-520 biosynthetic gene cluster.

[0031] FIG. 2 shows the loading module (load), the ten extender modules, and the peptide synthetase domain of the FK-520 PKS, together with, on the top line, the genes that encode the various domains and modules. Also shown are the various intermediates in FK-520 biosynthesis, as well as the structure of FK-520, with carbons 13, 15, 21, and 31 numbered. The various domains of each module and subdomains of the loading module are also shown. The darkened circles showing the DH domains in modules 2, 3, and 4 indicate that the dehydratase domain is not functional as a dehydratase; this domain may affect the stereochemistry at the corresponding position in the polyketide. The substituents on the FK-520 structure that result from the action of non-PKS enzymes are also indicated by arrows, together with the types of enzymes or the genes that code for the enzymes that mediate the action. Although the methyltransferase is shown acting at the C-13 and C-15 hydroxyl groups after release of the polyketide from the PKS, the methyltransferase may act on the 2-hydroxymalonyl substrate prior to or contemporaneously with its incorporation during polyketide synthesis.

[0032] FIG. 3 shows a close-up view of the left end of the FK-520 gene cluster, which contains at least ten additional genes. The ethyl side chain on carbon 21 of FK-520 (FIG. 2) is derived from an ethylmalonyl CoA extender unit that is incorporated by an ethylmalonyl specific AT domain in extender module 4 of the PKS. At least four of the genes in this region code for enzymes involved in ethylmalonyl biosynthesis. The polyhydroxybutyrate depolymerase is involved in maintaining hydroxybutyryl-CoA pools during FK-520 production. Polyhydroxybutyrate accumulates during vegetative growth and disappears during stationary phase in other Streptomyces (Ranade and Vining, 1993, Can. J. Microbiol. 39:377). Open reading frames with unknown function are indicated with a question mark.

[0033] FIG. 4 shows a biosynthetic pathway for the biosynthesis of ethylmalonyl CoA from acetoacetyl CoA consistent with the function assigned to four of the genes in the FK-520 gene cluster shown in FIG. 3.

[0034] FIG. 5 shows a close-up view of the right-end of the FK-520 PKS gene cluster (and of the sequences on cosmid pKOS065-C31). The genes shown include fkbD, fkbM (a methyl transferase that methylates the hydroxyl group on C-31 of FK-520) fkbN (a homolog of a gene described as a regulator of cholesterol oxidase and that is believed to be a transcriptional activator), fkbQ (a type II thioesterase, which can increase polyketide production levels), and fkbS (a crotonyl-CoA reductase involved in the biosynthesis of ethylmalonyl CoA).

[0035] FIG. 6 shows the proposed degradative pathway for tacrolimus (FK-506) metabolism.

[0036] FIG. 7 shows a schematic process for the construction of recombinant PKS genes of the invention that encode PKS enzymes that produce 13-desmethoxy FK-506 and FK-520 polyketides of the invention, as described in Example 4, below.

[0037] FIG. 8, in Parts A and B, shows certain compounds of the invention preferred for dermal application in Part A and a synthetic route for making those compounds in Part B.

### DETAILED DESCRIPTION OF THE INVENTION

[0038] Given the valuable pharmaceutical properties of polyketides, there is a need for methods and reagents for producing large quantities of polyketides, as well as for producing related compounds not found in nature. The present invention provides such methods and reagents, with particular application to methods and reagents for producing the polyketides known as FK-520, also known as ascomycin or L-683,590 (see Holt et al., 1993, JACS 115:9925), and FK-506, also known as tacrolimus. Tacrolimus is a macrolide immunosuppressant used to prevent or treat rejection of transplanted heart, kidney, liver, lung, pancreas, and small bowel allografts. The drug is also useful for the prevention and treatment of graft-versus-host disease in patients receiving bone marrow transplants, and for the treatment of severe, refractory uveitis. There have been additional reports of the unapproved use of tacrolimus for other conditions, including alopecia universalis, autoimmune chronic active hepatitis, inflammatory bowel disease, multiple sclerosis, primary biliary cirrhosis, and scleroderma. The invention provides methods and reagents for making novel polyketides related in structure to FK-520 and FK-506, and structurally related polyketides such as rapamycin.

[0039] The FK-506 and rapamycin polyketides are potent immunosuppressants, with chemical structures shown below.

[chemical structure]

[0040] FK-520 differs from FK-506 in that it lacks the allyl group at C-21 of FK-506, having instead an ethyl group at that position, and has similar activity to FK-506, albeit reduced immunosuppressive activity.

[0041] These compounds act through initial formation of an intermediate complex with protein “immunophilins” known as FKBPs (FK-506 binding proteins), including FKBP-12. Immunophilins are a class of cytosolic proteins that form complexes with molecules such as FK-506, FK-520, and rapamycin that in turn serve as ligands for other cellular targets involved in signal transduction. Binding of FK-506, FK-520, and rapamycin to FKBP occurs through the structurally similar segments of the polyketide molecules, known as the “FKBP-binding domain” (as generally but not precisely indicated by the stippled regions in the structures above). The FK-506-FKBP complex then binds calcineurin, while the rapamycin-FKBP complex binds to a protein known as RAFT-1. Binding of the FKBP-polyketide complex to these second proteins occurs through the dissimilar regions of the drugs known as the “effector” domains.

[chemical structure]

[0042] The three component FKBP-polyketide-effector complex is required for signal transduction and subsequent immunosuppressive activity of FK-506, FK-520, and rapamycin. Modifications in the effector domains of FK-506, FK-520, and rapamycin that destroy binding to the effector proteins (calcineurin or RAFT) lead to loss of immunosuppressive activity, even though FKBP binding is unaffected. Further, such analogs antagonize the immunosuppressive effects of the parent polyketides, because they compete for FKBP. Such non-immunosuppressive analogs also show reduced toxicity (see Dumont et al., 1992, Journal of Experimental Medicine 176, 751-760), indicating that much of the toxicity of these drugs is not linked to FKBP binding.

[0043] In addition to immunosuppressive activity, FK-520, FK-506, and rapamycin have neurotrophic activity. In the central nervous system and in peripheral nerves, immunophilins are referred to as “neuroimmunophilins”. The neuroimmunophilin FKBP is markedly enriched in the central nervous system and in peripheral nerves. Molecules that bind to the neuroimmunophilin FKBP, such as FK-506 and FK-520, have the remarkable effect of stimulating nerve growth. In vitro, they act as neurotrophins, i.e., they promote neurite outgrowth in NGF-treated PC12 cells and in sensory neuronal cultures, and in intact animals, they promote regrowth of damaged facial and sciatic nerves, and repair lesioned serotonin and dopamine neurons in the brain. See Gold et al., June 1999, J. Pharm. Exp. Ther. 289(3): 1202-1210; Lyons et al., 1994, Proc. National Academy of Science 91: 3191-3195; Gold et al., 1995, Journal of Neuroscience 15: 7509-7516; and Steiner et al., 1997, Proc. National Academy of Science 94: 2019-2024. Further, the restored central and peripheral neurons appear to be functional.

[0044] Compared to protein neurotrophic molecules (BNDF, NGF, etc.), the small-molecule neurotrophins such as FK-506, FK-520, and rapamycin have different, and often advantageous, properties. First, whereas protein neurotrophins are difficult to deliver to their intended site of action and may require intra-cranial injection, the small-molecule neurotrophins display excellent bioavailability; they are active when administered subcutaneously and orally. Second, whereas protein neurotrophins show quite specific effects, the small-molecule neurotrophins show rather broad effects. Finally, whereas protein neurotrophins often show effects on normal sensory nerves, the small-molecule neurotrophins do not induce aberrant sprouting of normal neuronal processes and seem to affect damaged nerves specifically. Neuroimmunophilin ligands have potential therapeutic utility in a variety of disorders involving nerve degeneration (e.g. multiple sclerosis, Parkinson's disease, Alzheimer's disease, stroke, traumatic spinal cord and brain injury, peripheral neuropathies).

[0045] Recent studies have shown that the immunosuppressive and neurite outgrowth activity of FK-506, FK-520, and rapamycin can be separated; the neuroregenerative activity in the absence of immunosuppressive activity is retained by agents which bind to FKBP but not to the effector proteins calcineurin or RAFT. See Steiner et al., 1997, Nature Medicine 3: 421-428.

[chemical structure]

[0046] Available structure-activity data show that the important features for neurotrophic activity of rapamycin, FK-520, and FK-506 lie within the common, contiguous segments of the macrolide ring that bind to FKBP. This portion of the molecule is termed the “FKBP binding domain” (see VanDuyne et al., 1993, Journal of Molecular Biology 229: 105-124.). Nevertheless, the effector domains of the parent macrolides contribute to conformational rigidity of the binding domain and thus indirectly contribute to FKBP binding.

[chemical structure]

[0047] There are a number of other reported analogs of FK-506, FK-520, and rapamycin that bind to FKBP but not the effector protein calcineurin or RAFT. These analogs show effects on nerve regeneration without immunosuppressive effects.

[0048] Naturally occurring FK-520 and FK-506 analogs include the antascomycins, which are FK-506-like macrolides that lack the functional groups of FK-506 that bind to calcineurin (see Fehr et al., 1996, The Journal of Antibiotics 49: 230-233). These molecules bind FKBP as effectively as does FK-506; they antagonize the effects of both FK-506 and rapamycin, yet lack immunosuppressive activity.

[chemical structure]

[0049] Other analogs can be produced by chemically modifying FK-506, FK-520, or rapamycin. One approach to obtaining neuroimmunophilin ligands is to destroy the effector binding region of FK-506, FK-520, or rapamycin by chemical modification. While the chemical modifications permitted on the parent compounds are quite limited, some useful chemically modified analogs exist. The FK-520 analog L-685,818 (ED₅₀=0.7 nM for FKBP binding; see Dumont et al., 1992), and the rapamycin analog WAY-124,466 (IC₅₀=12.5 nM; see Ocain et al., 1993, Biochemistry Biophysical Research Communications 192: 1340-134693) are about as effective as FK-506, FK-520, and rapamycin at promoting neurite outgrowth in sensory neurons (see Steiner et al., 1997).

[chemical structure]

[0050] One of the few positions of rapamycin that is readily amenable to chemical modification is the allylic 16-methoxy group; this reactive group is readily exchanged by acid-catalyzed nucleophilic substitution. Replacement of the 16-methoxy group of rapamycin with a variety of bulky groups has produced analogs showing selective loss of immunosuppressive activity while retaining FKBP-binding (see Luengo et al., 1995, Chemistry & Biology 2: 471-481). One of the best compounds, 1, below, shows complete loss of activity in the splenocyte proliferation assay with only a 10-fold reduction in binding to FKBP.

[chemical structure]

[0051] There are also synthetic analogs of FKBP binding domains. These compounds reflect an approach to obtaining neuroimmunophilin ligands based on “rationally designed” molecules that retain the FKBP-binding region in an appropriate conformation for binding to FKBP, but do not possess the effector binding regions. In one example, the ends of the FKBP binding domain were tethered by hydrocarbon chains (see Holt et al., 1993, Journal of the American Chemical Society 115: 9925-9938); the best analog, 2, below, binds to FKBP about as well as FK-506. In a similar approach, the ends of the FKBP binding domain were tethered by a tripeptide to give analog 3, below, which binds to FKBP about 20-fold poorer than FK-506. These compounds are anticipated to have neuroimmunophilin binding activity.

[chemical structure]

[0052] In a primate MPTP model of Parkinson's disease, administration of FKBP ligand GPI-1046 caused brain cells to regenerate and behavioral measures to improve. MPTP is a neurotoxin, which, when administered to animals, selectively damages nigral-striatal dopamine neurons in the brain, mimicking the damage caused by Parkinson's disease. Whereas, before treatment, animals were unable to use affected limbs, the FKBP ligand restored the ability of animals to feed themselves and gave improvements in measures of locomotor activity, neurological outcome, and fine motor control. There were also corresponding increases in regrowth of damaged nerve terminals. These results demonstrate the utility of FKBP ligands for treatment of diseases of the CNS.

[0053] From the above description, two general approaches towards the design of non-immunosuppressant, neuroimmunophilin ligands can be seen. The first involves the construction of constrained cyclic analogs of FK-506 in which the FKBP binding domain is fixed in a conformation optimal for binding to FKBP. The advantages of this approach are that the conformation of the analogs can be accurately modeled and predicted by computational methods, and the analogs closely resemble parent molecules that have proven pharmacological properties. A disadvantage is that the difficult chemistry limits the numbers and types of compounds that can be prepared. The second approach involves the trial and error construction of acyclic analogs of the FKBP binding domain by conventional medicinal chemistry. The advantages to this approach are that the chemistry is suitable for production of the numerous compounds needed for such interactive chemistry-bioassay approaches. The disadvantages are that the molecular types of compounds that have emerged have no known history of appropriate pharmacological properties, have rather labile ester functional groups, and are too conformationally mobile to allow accurate prediction of conformational properties.

[0054] The present invention provides useful methods and reagents related to the first approach, but with significant advantages. The invention provides recombinant PKS genes that produce a wide variety of polyketides that cannot otherwise be readily synthesized by chemical methodology alone. Moreover, the present invention provides polyketides that have either or both of the desired immunosuppressive and neurotrophic activities, some of which are produced only by fermentation and others of which are produced by fermentation and chemical modification. Thus, in one aspect, the invention provides compounds that optimally bind to FKBP but do not bind to the effector proteins. The methods and reagents of the invention can be used to prepare numerous constrained cyclic analogs of FK-520 in which the FKBP binding domain is fixed in a conformation optimal for binding to FKBP. Such compounds will show neuroimmunophilin binding (neurotrophic) but not immunosuppressive effects. The invention also allows direct manipulation of FK-520 and related chemical structures via genetic engineering of the enzymes involved in the biosynthesis of FK-520 (as well as related compounds, such as FK-506 and rapamycin); similar chemical modifications are simply not possible because of the complexity of the structures. The invention can also be used to introduce “chemical handles” into normally inert positions that permit subsequent chemical modifications.

[0055] Several general approaches to achieve the development of novel neuroimmunophilin ligands are facilitated by the methods and reagents of the present invention. One approach is to make “point mutations” of the functional groups of the parent FK-520 structure that bind to the effector molecules to eliminate their binding potential. These types of structural modifications are difficult to perform by chemical modification, but can be readily accomplished with the methods and reagents of the invention.

[0056] A second, more extensive approach facilitated by the present invention is to utilize molecular modeling to predict optimal structures ab initio that bind to FKBP but not effector molecules. Using the available X-ray crystal structure of FK-520 (or FK-506) bound to FKBP, molecular modeling can be used to predict polyketides that should optimally bind to FKBP but not calcineurin. Various macrolide structures can be generated by linking the ends of the FKBP-binding domain with “all possible” polyketide chains of variable length and substitution patterns that can be prepared by genetic manipulation of the FK-520 or FK-506 PKS gene cluster in accordance with the methods of the invention. The ground state conformations of the virtual library can be determined, and compounds that possess binding domains most likely to bind well to FKBP can be prepared and tested.

[0057] Once a compound is identified in accordance with the above approaches, the invention can be used to generate a focused library of analogs around the lead candidate, to “fine tune” the compound for optimal properties. Finally, the genetic engineering methods of the invention can be directed towards producing “chemical handles” that enable medicinal chemists to modify positions of the molecule previously inert to chemical modification. This opens the path to previously prohibited chemical optimization of lead compounds by time-proven approaches.

[0058] Moreover, the present invention provides polyketide compounds and the recombinant genes for the PKS enzymes that produce the compounds that have significant advantages over FK-506 and FK-520 and their analogs. The metabolism and pharmacokinetics of tacrolimus has been extensively studied, and FK-520 is believed to be similar in these respects. Absorption of tacrolimus is rapid, variable, and incomplete from the gastrointestinal tract (Harrison's Principles of Internal Medicine, 14th edition, 1998, McGraw Hill, 14, 20, 21, 64-67). The mean bioavailability of the oral dosage form is 27%, (range 5 to 65%). The volume of distribution (VolD) based on plasma is 5 to 65 L per kg of body weight (L/kg), and is much higher than the VolD based on whole blood concentrations, the difference reflecting the binding of tacrolimus to red blood cells. Whole blood concentrations may be 12 to 67 times the plasma concentrations. Protein binding is high (75 to 99%), primarily to albumin and alpha-acid glycoprotein. The half-life for distribution is 0.9 hour; elimination is biphasic and variable: terminal-11.3 hr (range, 3.5 to 40.5 hours). The time to peak concentration is 0.5 to 4 hours after oral administration.

[0059] Tacrolimus is metabolized primarily by cytochrome P450 3A enzymes in the liver and small intestine. The drug is extensively metabolized with less than 1% excreted unchanged in urine. Because hepatic dysfunction decreases clearance of tacrolimus, doses have to be reduced substantially in primary graft non-function, especially in children. In addition, drugs that induce the cytochrome P450 3A enzymes reduce tacrolimus levels, while drugs that inhibit these P450s increase tacrolimus levels. Tacrolimus bioavailability doubles with co-administration of ketoconazole, a drug that inhibits P450 3A. See, Vincent et al., 1992, In vitro metabolism of FK-506 in rat, rabbit, and human liver microsomes: Identification of a major metabolite and of cytochrome P450 3A as the major enzymes responsible for its metabolism, Arch. Biochem. Biophys. 294: 454-460; Iwasaki et al., 1993, Isolation, identification, and biological activities of oxidative metabolites of FK-506, a potent immunosuppressive macrolide lactone, Drug Metabolism & Disposition 21: 971-977; Shiraga et al., 1994, Metabolism of FK-506, a potent immunosuppressive agent, by cytochrome P450 3A enzymes in rat, dog, and human liver microsomes, Biochem. Pharmacol. 47: 727-735; and Iwasaki et al., 1995, Further metabolism of FK-506 (Tacrolimus); Identification and biological activities of the metabolites oxidized at multiple sites of FK-506, Drug Metabolism & Disposition 23: 28-34. The cytochrome P450 3A subfamily of isozymes has been implicated as important in this degradative process.

[0060] Structures of the eight isolated metabolites formed by liver microsomes are shown in FIG. 6. Four metabolites of FK-506 involve demethylation of the oxygens on carbons 13, 15, and 31, and hydroxylation of carbon 12. The 13-demethylated (hydroxy) compounds undergo cyclizations of the 13-hydroxy at C-10 to give MI, MVI and MVII, and the 12-hydroxy metabolite at C-10 to give I. Another four metabolites formed by oxidation of the four metabolites mentioned above were isolated by liver microsomes from dexamethasone treated rats. Three of these are metabolites doubly demethylated at the methoxy groups on carbons 15 and 31 (M-V), 13 and 31 (M-VI), and 13 and 15 (M-VII). The fourth, M-VIII, was the metabolite produced after demethylation of the 31-methoxy group, followed by formation of a fused ring system by further oxidation. Among the eight metabolites, M-II has immuno-suppressive activity comparable to that of FK-506, whereas the other metabolites exhibit weak or negligible activities. Importantly, the major metabolite of human, dog, and rat liver microsomes is the 13-demethylated and cyclized FK-506 (M-I).

[0061] Thus, the major metabolism of FK-506 proceeds via 13-demethylation followed by cyclization to the inactive M-I, this representing about 90% of the metabolic products after a 10 minute incubation with liver microsomes. Analogs of tacrolimus that do not possess a C-13 methoxy group would not be susceptible to the first and most important biotransformation in the destructive metabolism of tacrolimus (i.e. cyclization of 13-hydroxy to C-10). Thus, a 13-desmethoxy analog of FK-506 should have a longer half-life in the body than does FK-506. The C-13 methoxy group is believed not to be required for binding to FKBP or calcineurin. The C-13 methoxy is not present on the identical position of rapamycin, which binds to FKBP with equipotent affinity as tacrolimus. Also, analysis of the 3-dimensional structure of the FKBP-tacrolimus-calcineurin complex shows that the C-13 methoxy has no interaction with FKBP and only a minor interaction with calcineurin. The present invention provides C-13-desmethoxy analogs of FK-506 and FK-520, as well as the recombinant genes that encode the PKS enzymes that catalyze their synthesis and host cells that produce the compounds.

[0062] These compounds exhibit, relative to their naturally occurring counterparts, prolonged immunosuppressive action in vivo, thereby allowing a lower dosage and/or reduced frequency of administration. Dosing is more predictable, because the variability in FK-506 dosage is largely due to variation of metabolism rate. FK-506 levels in blood can vary widely depending on interactions with drugs that induce or inhibit cytochrome P450 3A (summarized in USP Drug Information for the Health Care Professional). Of particular importance are the numerous drugs that inhibit or compete for CYP 3A, because they increase FK-506 blood levels and lead to toxicity (Prograf package insert, Fujisawa□US, Rev 4/97, Rec 6/97). Also important are the drugs that induce P450 3A (e.g. Dexamethasone), because they decrease FK-506 blood levels and reduce efficacy. Because the major site of CYP 3A action on FK-506 is removed in the analogs provided by the present invention, those analogs are not as susceptible to drug interactions as the naturally occurring compounds.

[0063] Hyperglycemia, nephrotoxicity, and neurotoxicity are the most significant adverse effects resulting from the use of FK-506 and are believed to be similar for FK-520. Because these effects appear to occur primarily by the same mechanism as the immunosuppressive action (i.e. FKBP-calcineurin interaction), the intrinsic toxicity of the desmethoxy analogs may be similar to FK-506. However, toxicity of FK-506 is dose related and correlates with high blood levels of the drug (Prograf package insert, Fujisawa□US, Rev 4/97, Rec 6/97). Because the levels of the compounds provided by the present invention should be more controllable, the incidence of toxicity should be significantly decreased with the 13-desmethoxy analogs. Some reports show that certain FK-506 metabolites are more toxic than FK-506 itself, and this provides an additional reason to expect that a CYP 3A resistant analog can have lower toxicity and a higher therapeutic index.

[0064] Thus, the present invention provides novel compounds related in structure to FK-506 and FK-520 but with improved properties. The invention also provides methods for making these compounds by fermentation of recombinant host cells, as well as the recombinant host cells, the recombinant vectors in those host cells, and the recombinant proteins encoded by those vectors. The present invention also provides other valuable materials useful in the construction of these recombinant vectors that have many other important applications as well. In particular, the present invention provides the FK-520 PKS genes, as well as certain genes involved in the biosynthesis of FK-520 in recombinant form.

[0065] FK-520 is produced at relatively low levels in the naturally occurring cells, Streptomyces hygroscopicus var. ascomyceticus, in which it was first identified. Thus, another benefit provided by the recombinant FK-520 PKS and related genes of the present invention is the ability to produce FK-520 in greater quantities in the recombinant host cells provided by the invention. The invention also provides methods for making novel FK-520 analogs, in addition to the desmethoxy analogs described above, and derivatives in recombinant host cells of any origin.

[0066] The biosynthesis of FK-520 involves the action of several enzymes. The FK-520 PKS enzyme, which is composed of the fkbA, fkbB, fkbC, and fkbP gene products, synthesizes the core structure of the molecule. There is also a hydroxylation at C-9 mediated by the P450 hydroxylase that is the fkbD gene product and that is oxidized by the fkbO gene product to result in the formation of a keto group at C-9. There is also a methylation at C-31 that is mediated by an O-methyltransferase that is the fkbM gene product. There are also methylations at the C-13 and C-15 positions by a methyltransferase believed to be encoded by the fkbG gene; this methyltransferase may act on the hydroxymalonyl CoA substrates prior to binding of the substrate to the AT domains of the PKS during polyketide synthesis. The present invention provides the genes encoding these enzymes in recombinant form. The invention also provides the genes encoding the enzymes involved in ethylmalonyl CoA and 2-hydroxymalonyl CoA biosynthesis in recombinant form. Moreover, the invention provides Streptomyces hygroscopicus var. ascomyceticus recombinant host cells lacking one or more of these genes that are useful in the production of useful compounds.

[0067] The cells are useful in production in a variety of ways. First, certain cells make a useful FK-520-related compound merely as a result of inactivation of one or more of the FK-520 biosynthesis genes. Thus, by inactivating the C-31 O-methyltransferase gene in Streptomyces hygroscopicus var. ascomyceticus, one creates a host cell that makes a desmethyl (at C-31) derivative of FK-520. Second, other cells of the invention are unable to make FK-520 or FK-520 related compounds due to an inactivation of one or more of the PKS genes. These cells are useful in the production of other polyketides produced by PKS enzymes that are encoded on recombinant expression vectors and introduced into the host cell.

[0068] Moreover, if only one PKS gene is inactivated, the ability to produce FK-520 or an FK-520 derivative compound is restored by introduction of a recombinant expression vector that contains the functional gene in a modified or unmodified form. The introduced gene produces a gene product that, together with the other endogenous and functional gene products, produces the desired compound. This methodology enables one to produce FK-520 derivative compounds without requiring that all of the genes for the PKS enzyme be present on one or more expression vectors. Additional applications and benefits of such cells and methodology will be readily apparent to those of skill in the art after consideration of how the recombinant genes were isolated and employed in the construction of the compounds of the invention.

[0069] The FK-520 biosynthetic genes were isolated by the following procedure. Genomic DNA was isolated from Streptomyces hygroscopicus var. ascomyceticus (ATCC 14891) using the lysozyme/proteinase K protocol described in Genetic Manipulation of Streptomyces-A Laboratory Manual (Hopwood et al., 1986). The average size of the DNA was estimated to be between 80-120 kb by electrophoresis on 0.3% agarose gels. A library was constructed in the SuperCOS™ vector according to the manufacturer's instructions and with the reagents provided in the commercially available kit (Stratagene). Briefly, 100 μg of genomic DNA was partially digested with 4 units of Sau3A I for 20 min. in a reaction volume of 1 mL, and the fragments were dephosphorylated and ligated to SuperCos vector arms. The ligated DNA was packaged and used to infect log-stage XL1-BlueMR cells. A library of about 10,000 independent cosmid clones was obtained.

[0070] Based on recently published sequence from the FK-506 cluster (Motamedi and Shafiee, 1998, Eur. J. Biochem. 256: 528), a probe for the fkbO gene was isolated from ATCC 14891 using PCR with degenerate primers. With this probe, a cosmid designated pKOS034-124 was isolated from the library. With probes made from the ends of cosmid pKOS034-124, an additional cosmid designated pKOS034-120 was isolated. These cosmids (pKOS034-124 and pKOS034-120) were shown to contain DNA inserts that overlap with one another. Initial sequence data from these two cosmids generated sequences similar to sequences from the FK-506 and rapamycin clusters, indicating that the inserts were from the FK-520 PKS gene cluster. Two EcoRI fragments were subcloned from cosmids pKOS034-124 and pKOS034-120. These subclones were used to prepare shotgun libraries by partial digestion with Sau3AI, gel purification of fragments between 1.5 kb and 3 kb in size, and ligation into the pLitmus28 vector (New England Biolabs). These libraries were sequenced using dye terminators on a Beckmann CEQ2000 capillary electrophoresis sequencer, according to the manufacturer's protocols.

[0071] To obtain cosmids containing sequence on the left and right sides of the sequenced region described above, a new cosmid library of ATCC 14891 DNA was prepared essentially as described above. This new library was screened with a new fkbM probe isolated using DNA from ATCC 14891. A probe representing the fkbP gene at the end of cosmid pKOS034-124 was also used. Several additional cosmids to the right of the previously sequenced region were identified. Cosmids pKOS065-C31 and pKOS065-C3 were identified and then mapped with restriction enzymes. Initial sequences from these cosmids were consistent with the expected organization of the cluster in this region. More extensive sequencing showed that both cosmids contained in addition to the desired sequences, other sequences not contiguous to the desired sequences on the host cell chromosomal DNA. Probing of additional cosmid libraries identified two additional cosmids, pKOS065-M27 and pKOS065-M21, that contained the desired sequences in a contiguous segment of chromosomal DNA. Cosmids pKOS034-124, pKOS034-120, pKOS065-M27, and pKOS065-M21 have been deposited with the American Type Culture Collection, Manassas, Va., USA. The complete nucleotide sequence of the coding sequences of the genes that encode the proteins of the FK-520 PKS are shown below but can also be determined from the cosmids of the invention deposited with the ATCC using standard methodology.

[0072] Referring to FIGS. 1 and 3, the FK-520 PKS gene cluster is composed of four open reading frames designated fkbB, fkbC, fkbA, and fkbP. The fkbB open reading frame encodes the loading module and the first four extender modules of the PKS. The fkbC open reading frame encodes extender modules five and six of the PKS. The fkbA open reading frame encodes extender modules seven, eight, nine, and ten of the PKS. The fkbP open reading frame encodes the NRPS of the PKS. Each of these genes can be isolated from the cosmids of the invention described above. The DNA sequences of these genes are provided below (SEQ ID NO:1) preceded by the following table identifying the start and stop codons of the open reading frames of each gene and the modules and domains contained therein.

| Nucleotides | Gene or Domain |
|---|---|
| complement (412-1836) | fkbW |
| complement (2020-3579) | fkbV |
| complement (3969-4496) | fkbR2 |
| complement (4595-5488) | fkbR1 |
| 5601-6818 | fkbE |
| 6808-8052 | fkbF |
| 8156-8824 | fkbG |
| complement (9122-9883) | fkbH |
| complement (9894-10994) | fkbI |
| complement (10987-11247) | fkbJ |
| complement (11244-12092) | fkbK |
| complement (12113-13150) | fkbL |
| complement (13212-23988) | fkbC (SEQ ID NO:74) |
| complement (23992-46573) | fkbB (SEQ ID NO:73) |
| 46754-47788 | fkbO |
| 47785-52272 | fkbP |
| 52275-71465 | fkbA (SEQ ID NO:72) |
| 71462-72628 | fkbD |
| 72625-73407 | fkbM |
| complement (73460-76202) | fkbN |
| complement (76336-77080) | JkbQ |
| complement (77076-77535) | JkbS |
| complement (44974-46573) | CoA ligase of loading domain |
| complement (43777-44629) | ER of loading domain |
| complement (43144-43660) | ACP of loading domain |
| complement (41842-43093) | KS of extender module 1 (KS1) |
| complement (40609-41842) | AT1 |
| complement (39442-40609) | DH1 |
| complement (38677-39307) | KR1 |
| complement (38371-38581) | ACP1 |
| complement (37145-38296) | KS2 |
| complement (35749-37144) | AT2 |
| complement (34606-35749) | DH2 (inactive) |
| complement (33823-34480) | KR2 |
| complement (33505-33715) | ACP2 |
| complement (32185-33439) | KS3 |
| complement (31018-32185) | AT3 |
| complement (29869-31018) | DH3 (inactive) |
| complement (29092-29740) | KR3 |
| complement (28750-28960) | ACP3 |
| complement (27430-28684) | KS4 |
| complement (26146-27430) | AT4 |
| complement (24997-26146) | DH4 (inactive) |
| complement (24163-24373) | ACP4 |
| complement (22653-23892) | KS5 |
| complement (21420-22653) | AT5 |
| complement (20241-21420) | DHS |
| complement (19464-20097) | KR5 |
| complement (19116-19326) | ACPS |
| complement (17820-19053) | KS6 |
| complement (16587-17820) | AT6 |
| complement (15438-16587) | DH6 |
| complement (14517-15294) | ER6 |
| complement (13761-14394) | KR6 |
| complement (13452-13662) | ACP6 |
| 52362-53576 | KS7 |
| 53577-54716 | AT7 |
| 54717-55871 | DH7 |
| 56019-56819 | ER7 |
| 56943-57575 | KR7 |
| 57711-57920 | ACP7 |
| 57990-59243 | KS8 |
| 59244-60398 | AT8 |
| 60399-61412 | DH8 (inactive) |
| 61548-62180 | KR8 |
| 62328-62537 | ACP8 |
| 62598-63854 | KS9 |
| 63855-65084 | AT9 |
| 65085-66254 | DH9 |
| 66399-67175 | ER9 |
| 67299-67931 | KR9 |
| 68094-68303 | ACP9 |
| 68397-69653 | KS10 |
| 69654-70985 | AT10 |
| 71064-71273 | ACP10 |

| | |
|---|---|
| 1 | GATCTCAGGC ATGAAGTCCT CCAGGCGAGG CGCCGAGGTG GTGAACACCT CGCCGCTGCT |
| 61 | TGTACGGACC ACTTCAGTCA GCGGCGATTG CGGAACCAAG TCATCCGGAA TAAAGGGCGG |
| 121 | TTACAAGATC CTCACATTGC GCGACCGCCA GCATACGCTG AGTTGCCTCA GAGGCAAACC |
| 181 | GAAAGGGCGC GGGCGGTCCG CACCAGGGCG GAGTACGCGA CGAGAGTGGC GCACCCGCGC |
| 241 | ACCGTCACCT CTCTCCCCCG CCGGCGGGAT GCCCGGCGTG ACACGGTTGG GCTCTCCTCG |
| 301 | ACGCTGAACA CCCGCGCGGT GTGGCGTCGG GGACACCGCC TGGCATCGGC CGGGTGACGG |
| 361 | TACGGGGAGG GCGTACGGCG GCCGTGGCTC GTGCTCACGG CCGCCGGGCG GTCATCCGTC |
| 421 | GAGACGGCAC TCGGCGAGCA GGGACGCCTG GTCGGCACCT GCGGGCCGGA CGACCGTGTG |
| 481 | GTTCGCGGGC GGGCGGTGGC CGGTGGTGAG CCAGCTCTCC AGGGCGGTGA AGGCTGAGCG |
| 541 | GTGACACGGC AGCAAAGGCC GGAGTCGGTC GGGGAAGGTG TCGACGAGGG CGTCGGTGTG |
| 601 | CGTGCCGTCC TCGATGCGGT AGTAGCGGTA CCGGCCGCCA GGCCGCTGCC GGACATACGC |
| 661 | GCGTACACGT CGGAGCCCGG GCGGCAGGCA GCAGCACGTC GAGAGTGCCT GGATGGTGAT |
| 721 | CAGCGGCTTG CCGATACGAC CGGTCAACGC GATGCGTTCC ACGGCCGCGT GGACGCCGGA |
| 781 | GGAGCGGGTG GCGTAGTCGT AGTCGGCATC GCAGCCCGGG ACCGTCCCCG GGGCGCAATA |
| 841 | CGGTGTGCCG GCTTCCTTCT CCCCATCGAA GCCGGGGTCG AACTCCTCGC GGTAGACGCG |
| 901 | CTGCGTCAGA TCCCAGTAGA CCTCGTGGTG GTACGGCCAC AAGAACTCGG AGTCGGCCGG |
| 961 | GAACCCGGCG CGGAGCAGCG CCTCGCGCGC CTGGCCGGCT GCGGGGCCGC CTGCCGCGTA |
| 1021 | GGTGGGGTAG TCGCGCAGGG CGGCCGGCAG GAAGGTGAAG AGGTTGGGAC CCTCCGCGCG |
| 1081 | CCACAGGGTG CCTTCCCAGT CGACTCCTCC GTCGTACAGC TCGGGATGGT TCTCCAGCTG |
| 1141 | CCAGCGCACG AGGTAGCCGC CGTTGGACAT CCCGGTGACC AGGGTGCGCT CGAGCGGCCG |
| 1201 | GTGGTAGCGC TGGGCGACCG ACGCGCGGGC GGCCCGGGTC AGCTGGGTGA GGCGGGTGTT |
| 1261 | CCACTCGGCG ACGGCGTCGC CCGGCCGGGA GCCATCACGG TAGAACGCGG GGCCGGTGTT |
| 1321 | GCCCTTGTCG GTGGCGGCGT AGGCGTAACC GCGGGCGAGC ACCCAGTCGG CGATGGCCCG |
| 1381 | GTCGTTGGCG TACTGCTCGC GGTTACCGGG GGTGCCGGCC ACGACCAGGC CACCGTTCCA |
| 1441 | GCGGTCGGGC AGCCGGATGA CGAACTGGGC GTCGTGGTTC CACCCGTGGT TGGTGTTGGT |
| 1501 | GGTGGAGGTG TCGGGGAAGT AGCCGTCGAT CTGGATCCCG GGCACTCCGG TGGGAGTGGC |
| 1561 | CAGGTTCTTG GGCGTCAGCC CTGCCCAGTC CGCCGGGTCG GTGTGGCCGG TGGCCGCCGT |
| 1621 | TCCCGCCGTG GTCAGCTCGT CCAGGCAGTC GGCCTGCTGA CGTGCCGCCG CCGGGACACG |
| 1681 | CAGCTGGGAC AGACGGGCGC AGTGACCGTC CGGGGCATCG GGAGCAGGCC GGGCCGTGGC |
| 1741 | CGGTGAGGGG AGCAGGACGG CGACTGCGGC CAGGGTGAGA GCGCCGAGGC CGGTGCGTCT |
| 1801 | TCTCGGGGCC CGTCCGACAC CGAGGGGCAG AACCATGGAG AGCCTCCAGA CGTGCGGATG |
| 1861 | GATGACGGAC TGGAGGCTAG GTCGCGCACG GTGGAGACGA ACATGGGTGC GCCCGCCATG |
| 1921 | ACTGAGGCCC CTCAGAGGTG GGCCGCCGCC ATGACGGGCG CGGGACCGCG GGCGCTCCGG |
| 1981 | GGCGGTGCCC GCGGCCGCCA CCGGTTCCGG GTCCCCGGGT CAGGGACAGG TGTCGTTCGC |
| 2041 | GACGGTGAAG TAGCCGGTCG GCGACTCTTT CAAGGTGGTC GTGACGAAGG TGTTGTACAG |
| 2101 | GCCCATGTTC TGGCCGGAGC CCTTGGCGTA GGTGTAACCG GCGCTCGTCG TGGCGCGGCC |
| 2161 | CGCCTGGACG TGAGCGTAGT TGCCGGCGGT CCAGCAGACG GCCGTGGCAC CGGTCGTCTG |
| 2221 | CGCGGTGACC GCGCCCGAGA GCGGTCCGGC CTTGCCGTCC GCGTCCCGGG CGGCGACCGC |
| 2281 | GTAGGTGTGC GATGTGCCCG CCCTCAGGCC GGTGTCCGTG TACGACGTCG TGGCGGACGT |
| 2341 | GGTGATCTGG GCACCGTCGC GGTGGACGGC GTAGTCGGTG GCGCCGTCGA CGGGTTTCCA |
| 2401 | GGTCAGGCTG ATGGTGGTGT CGGTGGCGCC GGTGGCGGCC AGGCCGGACG GAGCGGGCAG |
| 2461 | CGAACCGGGG TCGGAGGCGG ATCCGCTCAG GCCGAAGAAC TGCGTGATCC AGTAGCTGGA |
| 2521 | ACAGATCGAG TCCAGGAAGT AGGCGGCGCC GGTGCTGCCG CACTGCTGTG CTCCGGTGCC |
| 2581 | GGGATCGACC GGGGTGCCGT GCCCGATGCC CGGCACCCGG TTCACCTCCA CGGCCACCGA |
| 2641 | TCCGTCCGCG GCCAGGTACT CCTCGTGCCG GGTGGAGTTC GGGCCGATCA CCGAGGTACG |
| 2701 | GTCCGGCGTC TGGGACACGC CGTGCACAGC GGTCCACTGG TCGCGCAACT CGTCGGCGTT |
| 2761 | GCGCGGCGCG ACGGTGGTGT CCTTGTCGCC GTGCCAGATG GCCACGCGCG GCCACGGGCC |
| 2821 | CGACCACGAG GGGTAGCCGT CACGGACCCG CCGCGCCCAC TGGTCCGCGG TCAGGTCGGT |
| 2881 | CCCGGGGTTC ATGCACAGGT ACGCGCTGCT GACGTCGGTG GCACAGCCGA AGGGCAGGCC |
| 2941 | GGCGACGACC GCGCCGGCCT GGAAGACGTC CGGATAGGTG GCGAGCATCA CCGACGTCAT |
| 3001 | GGCACCGCCG GCGGACAGCC CGGTGATGTA GGTGCGCTGG GGGTCCGCGC CGTAGGCGGA |
| 3061 | GACGGTGTGA GCGGCCATCT GCCGGATCGA CGCGGCTTCG CCCTGGCCCC TGCGGTTGTC |
| 3121 | GCTGCTCTGG AACCAGTTGA AGCACCTGTT CGCGTTGTTC GACGACGTGG TCTCGGCGAA |
| 3181 | CACGAGCAGG AAGCCATAGC GGTCCGCGAA TGAGAGCAGG CCGGAGTTGT CGGCGTAGCC |
| 3241 | CTGGGCGTCC TGGGTGCAAC CGTGCAGGGC GAACACCACC GCCGGCTCCG CGGGCAGGGA |
| 3301 | CGCGGGCCGG TAGACGTACA TGTTCAGCCG GCCCGGGTTC GTGCCGAAGT CCGCGACCTC |
| 3361 | GGTCAGGTCC GCCTTGGTCA GACCGGGCTT GGCCAGGCCC GCCGCGGCGT GGGCCGTCGG |
| 3421 | CGCCGGGCCG AGCAGGGCCG CTCCGAGTAC GAGGGCCACG ACGGCCACGA GACGGGTGAG |
| 3481 | CACCCCCCGC CGTCCCGGAC GCGACAACGA CCCGACCGGC GGCGAGGAGG AGAGGGGGAA |
| 3541 | CAGCGGGGTG AGGATTCCCC GGAACGGCGG CGGCTGCATG GCGGCTCCCT CGATGTCGTG |
| 3601 | GGGGGGACAC GGAGGGCTCC CTGACGTCGA TCAGTGGGAG CGCCCCGGTG CCCGGCACCG |
| 3661 | TAGGGGTGGT TCAACCCGCA ACGGTATGGC CCGGAGCACC ACACCCCGCA CCGCGCGATG |
| 3721 | TGCGCCCGGA CGGATTGTGT CGCCTTGCGG AATCTGATAC CCGGACGCGA CGAACGCCCC |
| 3781 | ACCCGACACG GGTAGGGCGT CATGGTGTCC GACTCGGCCG GTGGGCCTTG CCTGCCCTGG |
| 3841 | ACGGACCGGG CGTCGGCGGA CCGGGCGTCG GCGGGCTGGG CGGTATGGCG GCCGAGGACG |
| 3901 | CCAGCCGCGT GGGGCGGCCG CGCCCAAGTG CAGTACGCCG ACCGTGGCCG GCGGGAGGGC |
| 3961 | CGGACCGGTC AGTGCAGTCC CGCGGCCCTG CGGGACCGCT CGTCCCAGAC GGGTTCCACC |
| 4021 | GCGGCGAACC GGGGTCCGTG TCCGCGGCGG TAGACCATCA GTGTCCGCTC GAAGGTGATG |
| 4081 | ACGATGACAC CGTCCTGGTT GTAGCCGATG GTGCGCACGC TGATGATGCC TACGTCAGGT |
| 4141 | CGGCTGGCGG ACTCCCGGGT GTTCAGGACC TCGGACTGCG AGTAGATGGT GTCGCCCTCG |
| 4201 | AAGACGGGGT TCGGCAGCCT GACCCGGTCC CAGCCGAGGT TGGCCATCAC ATGCTGGGAG |
| 4261 | ATGTCGGTGA CGCTCTGCCC GGTGACCAGG GCGAGGGTGA AGGTGGAGTC CACCAGCGGC |
| 4321 | TTGCCCCAGG TGGTGCCCGC CGAGTAGTGG CGGTCGAAGT GCAGCGGCGC GGTGTTCTGC |
| 4381 | GTCAGGAGCG TGAGCCAGGA GTTGTCGGTC TCCAGGACCG TGCGGCCCAG GGGGTGGCGG |
| 4441 | TACACGTCGC CGGTGGTGAA GTCCTCGAAG TAGCGGCCCT GCCAGCCCTC GACCACAGCG |
| 4501 | GTGCGGGTGG CGTCCTGGTC CGGGTTCTCA GTCGTCATGG CGCTCATTCT GGGAAGTCCC |
| 4561 | CGGTCCGCTG TGAAATGCCG AACCTTCACC GGGCTCATAC GTGCGGCGCA TGAGCCCTGG |
| 4621 | ACCGTACGTA GTCGTAGAAC CTCGCCACCA CTGGCGCGCG TGGTCCTCCG GCGAGTGTGA |
| 4681 | CCACGCCGAC CGTGCGCCGC GCCTGCGGGT CGTCGAGCGG CACGGCGACG GCGTGGTCAC |
| 4741 | CGGGCCCGGA CGGGCTGCCG GTGAGGGGGG CGACGGCCAC ACCGAGGCCG GCGGCGACCA |
| 4801 | GGGCCCGCAG CGTGCTCAGC TCGGTGCTCT CCAGGACGAC CCGCGGCACG AATCCGGCCG |
| 4861 | CGGCGCACAG CCGGTCGGTG ATCTGGCGCA GTCCGAAGAC CGGCTCCAGT GCCACGAACG |
| 4921 | CCTCATCGGC CAGCTCCGCG GTCCGCACCC GGCGGCGTCT GGCCAGCCGG TGTCGGGGTG |
| 4981 | GGACGAGCAG GCACAGTGCC TCGTCCCGCA GTGGTGTCCA CTCCACATCG TCCCGGGCGG |
| 5041 | GTCGTGGGCT GGTCAGCCCC AGGTCCAGCC TGCTGTTGCG GACGTCGTCG ACCACGGCGT |
| 5101 | CGGCGGCGTC GCCGCGCAGT TCGAAGGTGG TGCCGGGAGC CAGCCGGCGG TACCCGGCGA |
| 5161 | GGAGGTCGGG CACCAGCCAG GTGCCGTAGG AGTGCAGGAA ACCCAGTGCC ACGGTGCCGG |
| 5221 | TGTCGGGGTC GATCAGGGCG GTGATGCGCT GCTCGGCGCC GGAGACCTCA CTGATCGCGC |
| 5281 | GCAGGGCGTG GGCGCGGAAG ACCTCGCCGT ACTTGTTGAG CCGGAGCCGG TTCTGGTGCC |
| 5341 | GGTCGAACAG CGGCACGCCC ACTCGTCGCT CCAGCCGCCG GATGGCCCTG GACAGGGTCG |
| 5401 | GCTGGGAGAT GTTGAGCCGT TCCGCGGTGA TCGTCACGTG CTCGTGCTCG GCCAAGGCCG |
| 5461 | TGAACCACTG CAACTCCCGT ATCTCCATGC AGGGACTATA CGTACCGGGC ATGGTCCTGG |
| 5521 | CGAGGTTTCG TCATTTCACA GCGGCCGGGC GGCGGCCCAC AGTGAGTCCT CACCAACCAG |
| 5581 | GACCCCATGG GAGGGACCCC ATGTCCGAGC CGCATCCTCG CCCTGAACAG GAACGCCCCG |
| 5641 | CCGGGCCCCT GTCCGGTCTG CTCGTGGTTT CTTTGGAGCA GGCCGTCGCC GCTCCGTTCG |
| 5701 | CCACCCGCCA CCTGGCGGAC CTGGGCGCCC GTGTCATCAA GATCGAACGC CCCGGCAGCG |
| 5761 | GCGACCTCGC CCGCGGCTAC GACCGCACGG TGCGTGGCAT GTCCAGCCAC TTCGTCTGGC |
| 5821 | TGAACCGGGG GAAGGAGAGC GTCCAGCTCG ATGTGCGCTC GCCGGAGGGC AACCGGCACC |
| 5881 | TGCACGCCTT GGTGGACCGG GCCGATGTCC TGGTGCAGAA TCTGGCACCC GGCGCCGCGG |
| 5941 | GCCGCCTGGC ATCGGCCACC AGGTCCTCGC GCGGAGCCAC CGAGGCTGAT CACCTGCGGA |
| 6001 | CATATCCGGC TACGGCAGTA CCGGCTGCTA CCGCGGACCG CAAGGCGTAC GACCTCCTGG |
| 6061 | TCCAGTGCGA AGCGGGGCTG GTCTCCATCA CCGGCACCCC CGAGACCCCG TCCAAGGTGG |
| 6121 | GCCTGTCCAT CGCGGACATC TGTGCGGGGA TGTACGCGTA CTCCGGCATC CTCACGGCCC |
| 6181 | TGCTGAAGCG GGCCCGCACC GGCCGGGGCT CGCAGTTGGA GGTCTCGATG CTCGAAGCCC |
| 6241 | TCGGTGAATG GATGGGATAC GCCGAGTACT ACACGCGCTA CGGCGGCACC GCTCCGGCCC |
| 6301 | GCGCCGGCGC CAGCCACGCG ACGATCGCCC CCTACGGCCC GTTCACCACG CGCGACGGGC |
| 6361 | AGACGATCAA TCTCGGGCTC CAGAACGAGC GGGAGTGGGC TTCCTTCTGC GGTGTCGTGC |
| 6421 | TACAACGCCC CGGTCTCTGC GACGACCCGC GCTTTTCCGG CAACGCCGAC CGGGTGGCGC |
| 6481 | ACCGCACCGA GCTCGACGCC CTGGTGAGCG AGGTGACGGG CACGCTCACC GGCGAGGAAC |
| 6541 | TGGTGGCGCG GCTGGAGGAG GCGTCGATCG CCTACGCACG CCAGCGCACC GTGCGGGAGT |
| 6601 | TCAGCGAACA CCCCCAACTG CGTGACCGTG GACGCTGGGC TCCGTTCGAC AGCCCGGTCG |
| 6661 | GTGCGCTGGA GGGCCTGATC CCCCCGGTCA CCTTCCACGG CGAGCACCCG CGGCGGCTGG |
| 6721 | GCCGGGTCCC GGAGCTGGGC GAGOATACOG AGTCCGTCCT GGCGTGGCTG GCCGCGCCCC |
| 6781 | ACAGCGCCGA CCGCGAAGAG GCCGGCCATG CCGAATGAAC TCACCGGAGT CCTGATCCTG |
| 6841 | GCCGCCGTGT TCCTGCTCGC CGGCGTACGG GGGCTGAACA TGGGCCTGCT CGCGCTGGTC |
| 6901 | GCCACCTTTC TGCTCGGGGT GGTCGCACTC GACCGAACGC CGGACGAGGT GCTGGCGGGT |
| 6961 | TTCCCCGCGA GCATGTTCCT GGTGCTGGTC GCCGTCACGT TCCTCTTCGG GATCGCCCGC |
| 7021 | GTCAACGGCA CGGTGGACTG GCTGGTACGT GTCGCGGTGC GGGCGGTGGG GGCCCGGGTG |
| 7081 | GGAGCCGTCC CCTGGGTGCT CTTCGGCCTG GCGGCACTGC TCTGCGCGAC AGGCGCGGCC |
| 7141 | TCGCCCGCGG CGGTGGCGAT CGTGGCGCCG ATCAGCGTCG CGTTCGCCGT CAGGCACCGC |
| 7201 | ATCGATCCGC TGTACGCCGG ACTGATGGCG GTGAACGGGG CCGCAGCCGG CAGTTTCGCC |
| 7261 | CCCTCCGGGA TCCTGGGCGG CATCGTCCAC TCGGCGCTGG AGAAGAACCA TCTGCCCGTC |
| 7321 | AGCGGCGGGC TGCTCTTCGC AGGCACCTTC GCCTTCAACC TGGCGGTCGC CGCGGTGTCA |
| 7381 | TGGCTCGTCC TCGGGCGCAG GCGCCTCGAA CCACATGACC TGGACGAGGA CACCGATCCC |
| 7441 | ACGGAAGGGG ACCCGGCTTC CCGCCCCGGC GCGGAACACG TGATGACGCT GACCGCGATG |
| 7501 | GCCGCGCTGG TGCTGGGAAC CACGGTCCTC TCCCTGGACA CCGGCTTCCT GGCCCTCACC |
| 7561 | TTGGCGGCGT TGCTGGCGCT GCTCTTCCCG CGCACCTCCC AGCAGGCCAC CAAGGAGATC |
| 7621 | GCCTGGCCCG TGGTGCTGCT GGTATGCGGG ATCGTGACCT ACGTCGCCCT GCTCCAGGAG |
| 7681 | CTGGGCATCG TGGACTCCCT GGGGAAGATG ATCGCGGCGA TCGGCACCCC GCTGCTGGCC |
| 7741 | GCCCTGGTGA TCTGCTACGT GGGCGGTGTC GTCTCGGCCT TCGCCTCGAC CACCGGGATC |
| 7801 | CTCGGTGCCC TGATGCCGCT GTCCGAGCCG TTCCTGAAGT CCGGTGCCAT CGGGACGACC |
| 7861 | GGCATGGTGA TGGCCCTGGC GGCCGCGGCG ACCGTGGTGG ACGCGAGTCC CTTCTCCACC |
| 7921 | AATGGTGCTC TGGTGGTGGC CAACGCTCCC GAGCGGCTGC GGCCCGGCGT GTACCAGGGG |
| 7981 | TTGCTGTGGT GGGGCGCCGG GGTGTGCGCA GTGGCTCCCG CGGCCGCCTG GGCGGCCTTC |
| 8041 | GTGGTGGCGT GAGCGCAGCG GAGCGGGAAT CCCCTGGAGC CCGTTTCCCG TGCTGTGTCG |
| 8101 | CTGACGTAGC GTCAAGTCCA CGTGCCGGGC GGGCAGTACG CCTAGCATGT CGGGCATGGC |
| 8161 | TAATCAGATA ACCCTGTCCG ACACGCTGCT CGCTTACGTA CGGAAGGTGT CCCTGCGCGA |
| 8221 | TGACGAGGTG CTGAGCCGGC TGCGCGCGCA GACGGCCGAG CTGCCGGGCG GTGGCGTACT |
| 8281 | GCCGGTGCAG GCCGAGGAGG GACAGTTCCT CGAGTTCCTG GTGCGGTTGA CCGGCGCGCG |
| 8341 | TCAGGTGCTG GAGATCGGGA CGTACACCGG CTACAGCACG CTCTGCCTGG CCCGCGGATT |
| 8401 | GGCGCCCGGG GGCCGTGTGG TGACGTGCGA TGTCATGCCG AAGTGGCCCG AGGTGGGCGA |
| 8461 | GCGGTACTGG GAGGAGGCCG GGGTTGCCGA CCGGATCGAC GTCCGGATCG GCGACGCCCG |
| 8521 | GACCGTCCTC ACCGGGCTGC TCGACGAGGC GGGCGCGGGG CCGGAGTCGT TCGACATGGT |
| 8581 | GTTCATCGAC GCCGACAAGG CCGGCTACCC CGCCTACTAC GAGGCGGCGC TGCCGCTGGT |
| 8641 | ACGCCGCGGC GGGCTGATCG TCGTCGACAA CACGCTGTTC TTCGGCCGGG TGGCCGACGA |
| 8701 | AGCGGTGCAG GACCCGGACA CGGTCGCGGT ACGCGAACTC AACGCGGCAC TGCGCGACGA |
| 8761 | CGACCGGGTG GACCTGGCGA TGCTGACGAC GGCCGACGGC GTCACCCTGC TGCGGAAACG |
| 8821 | GTGACCGGGG CGATGTCGGC GGCGGTCAGC GTCAGCGTCG TCGGCGCGGG CCTCGCGGAG |
| 8881 | GGCTCCAGAT GCAGGCGTTC GACGCCGGCG GCGGAAGCGC CCGCCACCTC GGACACGCAG |
| 8941 | GGGCAGTCGG AGTCCGCGAA GCCCGCGAAC CGGTAGGCGA TCTCCATCAT GCGGTTGCGG |
| 9001 | TCCGTACGCC GGAAGTCCGC CACCAGGTGC GCCCCCGCGC GGGCGCCCTG GTCCGTGAGC |
| 9061 | CAGTTCAGGA TCGTCGCACC GGCACCGAAC GACACGACCC GGCAGGACGT GGCGAGCAGT |
| 9121 | TTCAGGTGCC ACGTCGACGG CTTCTTCTCC AGCAGGATGA TGCCGACGGC GCCGTGCGGG |
| 9181 | CCGAAGCGGT CGCCCATGGT GACGACGAGG ACCTCATGGG CGGGATCGGT GAGCACGCGC |
| 9241 | GCAGGTCGGC GTCGGAGTAG TGCACGCCGG TCGCGTTCAT CTGGCTGGTC CGCAGCGTCA |
| 9301 | GTTCCTCGAC GCGGCTGAGT TCCTCCTCCC CCGCGGGTGC GATCGTCATG GAGAGGTCGA |
| 9361 | GCGAGCGCAG GAAGTCCTCG TCGGGACCGG AGTACGCCTC CCGGGCCTGG TCGCGCGCGA |
| 9421 | AACCCGCCTG GTACATCAGG CGGCGCCGAC GCGAGTCGAC CGTGGACACC GGCGGGCTGA |
| 9481 | ACTCCGGCAG CGACAGGAGC GTGGCCGCCT GCTCGGCCGG GTAGCACCGC ACCTCGGGCA |
| 9541 | GGTGGAACGC CACCTCGGCA CGCTCGGCGG GCTGGTCGTC GATGAACGCG ATCGTGGTCG |
| 9601 | GTGCGAAGTT CAGCTCCGTG GCGATCTCGC GGACGGACTG CGACTTCGGC CCCCATCCGA |
| 9661 | TGCGGGCCAG CACGAAGTAC TCCGCCACAC CGAGGCGTTC CAGACGCTCC CACGCGAGGT |
| 9721 | CGTGGTCGTT CTTGCTCGCC ACCGCCTGGA GGATGCCGCG GTCGTCGAGC GTGGTGATCA |
| 9781 | CCTCGCGGAT CTCGTCGGTG AGGACCACCT CGTCGTCCTC CAGCACGGTG CCCCGCCACA |
| 9841 | AGGTGTTGTC CAGGTCCCAG ACCAGACACT TGACAATGGT CATGGCTGTC CTCTCAAGCC |
| 9901 | GGGAGCGCCA GCGCGTGCTG GGCCAGCATC ACCCGGCACA TCTCGCTGCT GCCCTCGATG |
| 9961 | ATCTCCATGA GCTTGGCGTC GCGGTACGCC CGTTCGACGA CGTGTCCCTC TCTCGCGCCT |
| 10021 | GCCGACGCGA GCACCTGTGC GGCGGTCGCG GCCCCGGCGG CGGCTCGTTC GGCGGCGACG |
| 10081 | TGCTTGGCCA GGATCGTCGC GGGCACCATC TCGGGCGAGC CCTCGTCCCA GTGGTCGCTG |
| 10141 | GCGTACTCGC ACACGCGGGC CGCGATCTGC TCCGCGGTCC ACAGGTCGGC GATGTGCCCG |
| 10201 | GCGACGAGTT GGTGGTCGCC GAGCGGCCGG CCGAACTGCT CCCGGGTCCG GGCGTGGGCC |
| 10261 | ACCGCGGCGG TGCGGCAGGC CCGCAGGATC CCGACGCAGC CCCAGGCGAC CGACTTGCGC |
| 10321 | CCGTAGGCGA GTGACGCCGC GACCAGCATC GGCAGTGACG CGCCGGAGCC GGCCAGGACC |
| 10381 | GCGCCGGCCG GCACACGCAC CTGGTCCAGG TGCAGATCGG CGTGGCCGGC GGCGCGGCAG |
| 10441 | CCGGACGGCT TCGGGACGCG CTCGACGCGT ACGCCGGGGG TGTCGGCGGG CACGACCACC |
| 10501 | ACCGCACCGG AACCATCCTC CTGGAGACCG AAGACGACCA GGTGGTCCGC GTAGGCGGCG |
| 10561 | GCAGTCGTCC AGACCTTGTG GCCGTCGACG ACAGCGGTGT CCCCGTCGAG CCGAACCCGC |
| 10621 | GTCCGCATCG COGACAGATO GCTGCCCGCC TGCCGCTCAC TGAAGCCGAC GGCCGCGAGT |
| 10681 | TTCCCGCTGG TCAGCTCCTT CAGGAAGGTC GCCCGCTGAC CGGCGTCGCC GAGCCGCTGC |
| 10741 | ACGGTCCACG CGGCCATGCC CTGCGACGTC ATGACACTGC GCAGCGAACT GCAGAGGCTG |
| 10801 | CCGACGTGTG CGGTGAACTC GCCGTTCTCC CGGCTGCCGA GTCCCAGACC GCCGTGCTCG |
| 10861 | GCCGCCACTT CCGCGCAGAG CAGGCCGTCG GCGCCGAGCC GGACGAGCAG GTCGCGCGGC |
| 10921 | AGTTCGCCGG ACGTGTCCCA CTCGGCGGCC CGGTCACCGA CAAGGTCGGT CAGCAGCGCG |
| 10981 | TCACGCTCAG GCATCGACGG CCCGCAGCCG GTGGACGAGT GCGACCATGG ACTCGACGGT |
| 11041 | ACGGAAGTTC GCGAGCTGGA GGTCCGGGCC GGCGATCGTG ACGTCGAACG TCTTCTCCAG |
| 11101 | GTACACGACC AGTTCCATCG CGAACAGCGA CGTGAGGCCG CCCTCCGCGA ACAGGTCGCG |
| 11161 | GTCCACGGGC CAGTCCGACC TGGTCTTCGT CTTGAGGAAC GCGACCAACG CGTGCGCGAC |
| 11221 | GGGGTCGTCC TTGACGGGTG CGGTCATGAG AACACCTTCT CGTATTCGTA GAAGCCCCGG |
| 11281 | CCGGTCTTCC GGCCGTGGTG TCCCTCGCGG ACCTTGCCCA GCAGCAGGTC ACAGGGGCGG |
| 11341 | CTGCGCTCGT CGCCGGTGCG TTTGTGCAGC ACCCACAGCG CGTCGACGAG GTTGTCGATG |
| 11401 | CCGATCAGGT CCGCGGTGCG CAGCGGCCCG GTCGGATGGC CGAGGCACCC CGTCATGAGC |
| 11461 | GCGTCGACGT CCTCGACGGA CGCGGTGCCC TCCTGCACGA TCCGCGCCGC GTCGTTGATC |
| 11521 | ATCGGGTGGA GCAGCCGGCT CGTGACGAAG CCGGGCGCGT CCCGGACGAC GATCGGCTTG |
| 11581 | CGCCGCAGCG CCGCGAGCAG GTCCCCGGCG GCGGCCATGG CCTTCTCACC GGTCCGGGGT |
| 11641 | CCGCGGATCA CCTCGACCGT CGGGATCAGG TACGACGGGT TCATGAAGTG CGTGCCGAGC |
| 11701 | AGGTCCTCGG GCCGGGCCAC GGAGTCGGCC AGTTCGTCAA CCGGGATCGA CGACGTGTTC |
| 11761 | GTGATGACCG GGATACCGGG CGCCGCTGCC GAGACCGTGG CGAGTACCTC CGCCTTGACC |
| 11821 | TCGGCGTCCT CGACGACGGC CTCGATCACC GCGGTGGCCG TACCGATCGC GGGCAGCGCG |
| 11881 | GACGTGGCCG TCCGCAGCAC ACCGGGGTCG GCCTCGGCGG GCCCGGCCAC GAGTTGTGCC |
| 11941 | GTCCGCAGTT CGGTGGCGAT CCGCGCCCGC GCCGCCGTAA GGATCTCCTC GGACGTGTCG |
| 12001 | ACGAGTGTCA CCGGGACGCC GTGGCGCAGC GCGAGCGTGG TGATGCCGGT GCCCATCACT |
| 12061 | CCCGCGCCGA GCACGATCAG CTGGTGGTCC ACGCTGTTTC CTCCCTCCGG GGTCACCATG |
| 12121 | GCAGCGAGTA CGGGTCGAGG ACGTCTTCCG GGGTCGACCC GATCGCGTCC TTGCGGCCGA |
| 12181 | GGCCGAGTTC GTCGGCGAAG CCGAGCAGCA CGTCGAACGC GATGTGGTCG GCGAACGCGC |
| 12241 | TGCCCGTCGA GTCGAGGACG CTCAGGCTGT CCCGGTGGTC CGCCGCGGTG TCCGGTGCCG |
| 12301 | CGCACAGGGC CGCCAGCGAC GGGCCGAGCT CGCGGTCCGG CAGTTGCTGG TACTCGCCCT |
| 12361 | CGGCGCGGGC CTGCCCCGGA TGGTCGACGC AGATGAACGC GTCGTCGAGC AGGGTCTTCG |
| 12421 | GCAGTTCGGT CTTGCCCGGC TCGTCGGCGC CGATGGCGTT CACATGCAGG TGCGGCAGCC |
| 12481 | GCGGCTCGGC GGGCAGCACC GGCCCTTTGC CCGAGGGCAC CGAGGTGACG GTGGACAGGA |
| 12541 | CATCCGCGGC GGCGGCGGCC TCCGCCGGAT CGGTCACCTT GACCGGCAGT CCGAGGAACG |
| 12601 | CGATGCGGTC CGCGAACGAC GCCGCGTGGC CGGGGTCGGT GTCGCTGACC AGGATCCGCT |
| 12661 | CGATGGGCAG GACCCTGCTG AGCGCGTGCG CCTGGGTCAC CGCCTGTGCG CCCGCGCCGA |
| 12721 | TCAGCGTGAG CGTGGCGCTG TCGGACCGGG CCAGCAGCCG GCTCGCGACG GCGGCGACCG |
| 12781 | CGCCGGTCCG CATCGCGGTG ATCACGCCTG CGTCGGCGAG GGCGGTCAGA CTGCCGCTGT |
| 12841 | CGTCGTCGAG GCGCGACATC GTGCCGACGA TCGTCGGCAG CCGGAAGCGC GGATAGTTGT |
| 12901 | GCGGACTGTA CGAAACCGTC TTCATGGTCA CGCCGACACC GGGGACCCGG TACGGCATGA |
| 12961 | ACTCGATGAC GCCGGGAATG TCGCCGCCGC GGACGAATCC GGTACGCGGC GGCGCCTCGG |
| 13021 | CGAACTCGCC GCGGCCGAGC GCGGCGAACC CGTCGTGCAG CTCGCTGATC AGCCGGTCCA |
| 13081 | TCATCACGTC GCGGCCGATC ACGGAGAGAA TCCGCTTGAT GTCACGTTGG CGCAGGACCC |
| 13141 | TGGTCTGCAT GTGTCACCTC CCTTTCGTGG CCGGAGCTGT CTTGGTGGTG CCGCTCGGGG |
| 13201 | CGGCTTCCGT TCTCATCGCA GCTCCCTGTC GATGAGGTCG AAAATCTCGT CCGCGGTCGC |
| 13261 | GTCCGCGGAC AGCACGCCGG CCGGCGTGGT CGGGCGGGTC TCCCGCCGCC AGCGGTTGAG |
| 13321 | CAGGGCGTCC AGCCGGGTTC CGATCGCGTC CGCCTGGCGG GCGCCCGGGT CGACACCGGC |
| 13381 | AACGAGTGCT TCCAGCCGGT CGAGCTGCGC GAGCACCACG GTCACCGGGT CGTCCGGGGA |
| 13441 | CAGCAGTTCA CCGATGCGGT CGGCGAGTGC GCGCGGCGAC GGGTAGTCGA AGACGAGCGT |
| 13501 | GGCGGACAGT CGCAGACCGG TCGCCTCGTT GAGGCCGTTG CGCAGCTGCA CCGCGATGAG |
| 13561 | CGAGTCCACA CCGAGTTCCC GGAACGCCGC GTCCTCCGGG ATGTCCTCCG GGTCGGCGTG |
| 13621 | GCCCAGGACG GCCGCTGCCT TCTGCCGGAC GAGGGCGAGC AGGTCGGTGG GGCGTTCCTG |
| 13681 | CTCGTTGCGG GCGCTCCGGC GGGCCGACGG CTTGGGCCGG CCACGCAGCA GCGGGAGGTC |
| 13741 | CGGCGGCAGG TCGCCCGCCA CGGCGACGAC ACTGCCCGTT CCGGTGTGGA CGGCGGCGTC |
| 13801 | GTACATGCGC ATGCCCTGTT CGGCGGTGAG CGCGCTCGCC CCACCCTTGC GCATACGGCG |
| 13861 | CCGGTCGGCG TCGGTCAGGT CCGCGGTCAG GCCACTCGCC TGGTCCCACA GCCCCCACGC |
| 13921 | GATCGACAGC CCTGGCAGCC CTTGTGCACG CCGGTGTTCG GCGAGCGCGT CGAGGAACGC |
| 13981 | GTTCGCCGCC GCGTAGTTGC CCTGACCGGG GGTGCCCAGC ACACCGGCCG CCGACGAGTA |
| 14041 | GACGACGAAT GCGGCGAGGT CGGTGTCGCG GGTGAGCCGG TGCAGGTGCC AGGCGGCGTC |
| 14101 | GGCCTTGGGT TTGAGGACGG TGTCGATGCG GTCGGGGGTG AGGTTGTCGA GCAGGGCGTC |
| 14161 | GTCGAGGGTT CCGGCGGTGT GGAAGACGGC GGTGAGGGGT TGAGGGATGT GGGCGAGGGT |
| 14221 | GGTGGCGAGT TGGTGGGGGT CGCCGACGTC GCAGGGGAGG TGGGTGCCGG GGGTGGTGTC |
| 14281 | GGGGGGTGGG GTGCGGGAGA GGAGGTAGGT GTGGGGGTGG TTCAGGTGGC GGGCGAGGAT |
| 14341 | GCCGGCGAGG GTGCCGGAGC CGCCGGTGAT GACGACGGCC CCCTCGGGGT CCAGCGGCCG |
| 14401 | CGGGACCGTG AGGACGATCT TGCCGGTGTG CTCGCCGCGG CTCATGGTCG CCAGCGCCTC |
| 14461 | GCGGACCTGC CGCATGTCGT GCACCGTCAC CGGCAGCGGG TGCAGCACAC CGCGCGCGAA |
| 14521 | CAGGCCGAGC AGCTCCGCGA TGATCTCCTT GAGCCGGTCG GGCCCCGCGT CCATCAGGTC |
| 14581 | GAACGGTCGC TGGACGGCGT GCCGGATGTC CGTCTTCCCC ATCTCGATGA ACCGGCCACC |
| 14641 | CGGCGCGAGC AGGCCGACGG ACGCGTCGAG GAGTTCACCG GTGAGCGAGT TGAGCACGAC |
| 14701 | GTCGACCGGC GGGAACGCGT CGGCGAACGC GGTGCTGCGG GAATCGGCCA GATGCGCTCC |
| 14761 | GTCCAGGTCC ACCAGATGGC GCTTCGCGGC GCTGGTGGTC GCGTACACCT CCGCGCCCAG |
| 14821 | GTGCCGCGCG ATCTGCCGGG CGGCGGAACC GACACCGCCG GTGGCCGCGT GGATCAGGAC |
| 14881 | CTTCTCGCCG GGGCGCAGCC CGGCGAGGTC GACCAGGCCG TACCACGCGG TCGCGAACGC |
| 14941 | GGTCATCACG GACGCCGCCT GCGGGAACGT CCAGCCGTCC GGCATCCGGC CGAGCATCCG |
| 15001 | GTGGTCGGCG ATGACCGTGG GGCCGAAGCC GGTGCCGACG AGGCCGAAGA CGCGGTCGCC |
| 15061 | CGGTGCCAGA CCGGAGACGT CGGCGCCGGT CTCCAGGACG ATGCCCGCGG CCTCGCCGCC |
| 15121 | GAGCACGCCC TGACCGGGGT AGGTGCCGAG CGCGATCAGC ACATCGCGGA AGTTGAGGCC |
| 15181 | CGCCGCACGC ACACCGATCC GGACCTCGGC CGGGGCGAGG GGGCGCCGGG GCTCCGCCGA |
| 15241 | GTCGGCCGCG GTGAGGCCGT CGAGGGTGCC CGTCCGCGCC GGCCGGATCA GCCACGTGTC |
| 15301 | GCTGTCCGGC ACGGTGAGCG GCTCCGGCAC CCGGGTGAGG CGGGCCGCCT CGAACCGGCC |
| 15361 | GCCGCGCAGC CGCAGACGCG GCTCGCCGAG TGCGACGGCG ATGCGCTGCT GCTCGGGGGC |
| 15421 | GAGCGTGACG CCGGACTCGG TCTCGACGTG GACGAACCGG CCGGGCTGCT CGGCCTGGGC |
| 15481 | GGCGCGCAGC AGTCCGGCCG CCGCGCCGGT GGCGAGGCCC GCGGTGGTGT GCACGAGCAG |
| 15541 | ATCCCCGCCG GAGCCGGTCA GGGCGGTCAG CAGCCGGGTG GTGAGCGCAC GCGTCTCGGC |
| 15601 | CACCGGGTCG TCGCCATCAG CGGCAGGCAA CGTGATGACG TCCACGTCGG TCGCGGGGAC |
| 15661 | ATCCGTGGGT GCGGCGACCT CGATCCAGGT GAGACGCATC AGGCCGGTGC CGACGGGTGG |
| 15721 | GGACAGCGGG CGGGTGCGGA CCGTCCGGAT CTCGGCGACG AGTTGGCCGG CGGAGTCGGC |
| 15781 | GACGCGCAGA CTCAGCTCGT CGCCGTCACG AGTGATCACG GCTCGGAGCA TGGCCGAGCC |
| 15841 | CGTGGCGACG AACCGGGCCC CCTTCCAGGC GAACGGCAGA CCCGCAGCGC TGTCGTCCGG |
| 15901 | CGTGGTGAGG GCGACGGCGT GCAGGGCCGC GTCGAGCAGC GCCGGATGCA CACCGAAACC |
| 15961 | GTCCGCCTCG GCGGCCTGCT CGTCGGGCAG CGCCACCTCG GCATACACGG TGTCACCATC |
| 16021 | ACGCCAGGCA GCCCGCAACC CCTGGAACGC CGACCCGTAC TCATAACCGG CATCCCGCAG |
| 16081 | TTCGTCATAG AACCCCGAGA CGTCGACGGC CACGGCCGTG ACCGGCGGCC ACTGCGAGAA |
| 16141 | CGGCTCCACA CCGACAACAC CGGGGGTGTC GGGGGTGTCG GGGGTCAGGG TGCCGCTGGC |
| 16201 | GTGCCGGGTC CAGCTGCCCG TGCCCTCGGT ACGCGCGTGG ACGGTCACCG GCCGCCGTCC |
| 16261 | GGCCTCATCA GCCCCTTCCA CGGTCACCGA CACATCCACC GCTGCGGTCA CCGGCACCAC |
| 16321 | AAGGGGGGAT TCGATGACCA GCTCGTCCAC TATCCCGCAA CCGGTCTCGT CACCGGCCCG |
| 16381 | GATGACCAGC TCCACAAACG CCGTACCCGG CAGCAGGACC GTGCCCCGCA CCGCGTGATC |
| 16441 | AGCCAGCCAG GGGTGAGTGC GCAATGAGAT CCGGCCAGTG AGAACAACAC CACCATCGTC |
| 16501 | GGCGGGCAGC GCTGTGACAG CGGCCAGCAT CGGATGCGCC GCACCCGTCA ACCCCGCCGC |
| 16561 | CGACAGATCG GTGGCACCGG CCGCCTCCAG CCAGTACCGC CTGTGCTCGA ACGCGTACGT |
| 16621 | GGGCAGATCC AGCAGCCGTC CCGGCACCGG TTCGACCACC GTGTCCCAGT CCACTGCCGT |
| 16681 | GCCCAGGGTC CACGCCTGCG CCAACGCCGT CAGCCACCGC TCCCAGCCGC CGTCACCGGT |
| 16741 | CCGCAACGAC GCCACCGTGT GAGCCTGCTC CATCGCCGGC AGCAGCACCG GATGGGCACT |
| 16801 | GCACTCCACG AACACCGACC CATCCAGCTC CGCCACCGCC GCGTCCAACG CCACCGGACG |
| 16861 | ACGCAGATTC CGGTACCAGT ACCCCTCATC CACCGGCTCC GTCACCCAGG CGCTGTCCAC |
| 16921 | GGTCGACCAC CACGCCACCG ACGCGGCCTT CCCTGCCACC CCCTCCAGTA CCTTGGCCAG |
| 16981 | TTCATCCTCG ATGGCTTCCA CGTGGGGCGT GTGGGAGGCG TAGTCGACCG CGATACGACG |
| 17041 | CACCCGCACG CCTTCGGCCT CATACCGCGC CACCACCTCC TCCACCGCCG ACGGGTCCCC |
| 17101 | CGCCACCACC GTCGAAGCCG GGCCGTTACG CGCCGCGATC CACACACOCT CGACCAGACC |
| 17161 | GACCTCACCG GCCGGCAACG CCACCGAAGC CATCGCTCCC CGCCCGGCCA GTCGCGCCGC |
| 17221 | GATGACCTGA CTGCGCAATG CCACCACGCG GGCGGCGTCC TCGAGGCTGA GGGCTCCGGC |
| 17281 | CACGCACGCC GCCGCGATCT CGCCCTGGGA GTGTCCGATC ACCGCGTCCG GCACGACCCC |
| 17341 | ATGCGCCTGC CACAGCGCGG CCAGGCTCAC CGCGACCGCC CAGCTGGCCG GCTGGACCAC |
| 17401 | CTCCACCCGC TCCGCCACAT CCGGCCGCGC CAACATCTCC CGCACATCCC AGCCCGTGTG |
| 17461 | CGGCAGCAAC GCCTGAGCGC ACTCCTCCAT ACGCGCGGCG AACACCGCGG AGTGGGCCAT |
| 17521 | GAGTTCCACG CCCATGCCGA CCCACTGGGC GCCCTGGCCG GGGAAGACGA ACACCGTACG |
| 17581 | CGGCTGGTCC ACCGCCACAC CCGTCACCCG GGCATCGCCC AGCAGCACCG CACGGTGACC |
| 17641 | GAAGACAGCA CGCTCCCGCA CCAACCCCTG CGCGACCGCG GCCACATCCA CACCACCCCC |
| 17701 | GCGCAGATAC CCCTCCAGCC GCTCCACCTG CCCCCGCAGA CTCACCTCAC CACGAGCCGA |
| 17761 | CACCGGCAAC GGCACCAACC CGTCAACAAC CGACTCCCCA CGCGACGGCC CAGGAACACC |
| 17821 | CTCAAGGATC ACGTGCGCGT TCGTACCGCT CACCCCGAAC GACGACACAC CCGCATGCGG |
| 17881 | TGCCCGATCC GACTCGGGCC ACGGCCTCGC CTCGGTGAGC AGCTCCACCG CACCGGCCGA |
| 17941 | CCAGTCCACA TGCGACGACG GCTCGTCCAC ATGCAGCGTC TTCGGCGCGA TCCCGTACCG |
| 18001 | CATCGCCATG ACCATCTTGA TCACACCGGC GACACCCGCC GCCGCCTGCG CATGACCGAT |
| 18061 | GTTCGACTTC AACGAACCCA GCAGCAGCGG AACCTCACGC TCCTGCCCGT ACGTCGCCAG |
| 18121 | AATGGCCTGC GCCTCGATGG GATCGCCCAG CGTCGTCCCC GTCCCGTGCG CCTCCACCAC |
| 18181 | GTCCACATCG GCGGCGCGCA GTCCGGCGTT CACCAACGCC TGCTGGATGA CACGCTGCTG |
| 18241 | GGACGGGCCG TTGGGGGCGG ACAGCCCGTT GGAGGCACCG TCCTGGTTCA CCGCCGACCC |
| 18301 | GCGGACGACC GCGAGAACGG TGTGTCCGTT GCGCTCGGCG TCGGAGAGCC GCTCCAGCAC |
| 18361 | AAGAACGCCG GCGCCCTCCG CCCAGCCGGT GCCGTTGGCG GCGTCCGCGA ACGCGCGGCA |
| 18421 | GCGGCCGTCG GGGGAGAGTC CGCCCTGCTG CTGGAATTCC ACGAACCCGG TCGGGGTCGC |
| 18481 | CATGACGGTG ACACCGCCGA CCAGCGCCAG CGAGCACTCC CCGTGGCGCA GTGCGTGCCC |
| 18541 | GGCCTGGTGC AGCGCGACCA GCGACGACGA GCACGCCGTG TCCACCGTGA ACGCCGGTCC |
| 18601 | CTGGAGCCCA TAGAAGTACG AGATCCGGCC GGTGAGCACG CTGGGCTGCA TGCCGATCGA |
| 18661 | GCCGAACCCG TCCAGGTCCG CGCCGACGCC GTACCCGTAC GAGAAGGCGC CCATGAACAC |
| 18721 | GCCGGTGTCG CTGCCGCGCA GTGTGCCCGG CACGATGCCC GCGCTCTCGA ACGCCTCCCA |
| 18781 | TGTCGTTTCC AGCAGGATCC GCTGCTGGGG GTCCATGGCC CGTGCCTCAC GGGGGCTGAT |
| 18841 | GCCGAAGAAC GCGGCATCGA AGCCGGCGGC GTCGGAGAGG AAGCCGCCGC GGTCCGTGTC |
| 18901 | CGATCCGCCG GTGAGGCCGG ACGGGTCCCA GCCACGGTCG GCCGGGAAGC CGGTGACCGC |
| 18961 | GTCGCCGCCA CTGTCCACCA TGCGCCACAG GTCGTCGGGC GAGGTGACGC CGCCCGGCAG |
| 19021 | TCGGCAGGCC ATGCCCACGA TGGCCAGCGG TTCGTCACGG GTCGCGGCGG CTGTGGGAAC |
| 19081 | AGCGACCGGT GCGGCACCAC CGACCAGAGC CTCGTCCAAC CGCGACGCGA TGGCCCGCGG |
| 19141 | CGTCGGGTAG TCGAAGACAA GCGTGGCGGG CAGTCGGACA CCGGTCGCCG CGGCGAGTCG |
| 19201 | GTTCCGCAGT TCGACGGCGG TCAGCGAGTC GATACCCAGT TCCTTGAAGG CCGCGTCCGC |
| 19261 | GGACACGTCC GCGGCGTCCG CGTGGCCGAG CACCGCCGCC GCGTTGTCGC GGACCAGTGC |
| 19321 | CAGCAGCGCG GTGTCCCGCT CAGCGCCGGA CATGGTGCCG AGCCGGTCGG CGAGCGGAAC |
| 19381 | GGCGGTGGCC GCCGCCGGGC GCGATACGGC GCGGCGCAGA TCGGCGAAAA GCGGCGATGT |
| 19441 | GTGCGCGGTG AGGTCCATCG TGGCCGCCAC GGCGAACGCG GTGCCGGTTC CGGCCGCGGC |
| 19501 | TTCCAGCAGG CGCATGCCCA CACCGGCCGA CATGGGGCGG AAACCGCCGC GGCGGACACG |
| 19561 | GGTGCGGTTG GTGCCGCTCA TGCTGCCGGT GAGTCCGCTG TCATCGGCCC AGAGGCCCCA |
| 19621 | GGCCAGCGAC AGCGCGGGCA GTCCTTCGGC ATGGCGCAGC GTCGCGAGTC CGTCGAGGAA |
| 19681 | CCCGTTCGCC GCCGAGTAGT TGCCCTGGCC GCGGCCGCCC ATGATGCCCG CGACGGACGA |
| 19741 | GTAGAGGACG AACGAGCGCA GGTCCGCGTC CCGGGTCAGC TCGTGCAGGT GCCAGGCGCC |
| 19801 | GTCGGCTTTG GGGCGCAGTG TGGTGGCGAG CCGCTCCGGG GTGAGTGCCG TGGTCACGCC |
| 19861 | GTCGTCGAGC ACGGCTGCCG TGTGGAAGAC CGCCGTGAGC GGCCTGCCGG CGGCGGCGAG |
| 19921 | CGCGGCGGCG AGCTGGTCCC GGTCGGCGAC GTCACAGCGG ATGTGGACAC CGGGAGTGTC |
| 19981 | CGCCGGCGGT TCGCTGCGCG ACAGCAACAG GAGGTGGCGG GCGCCATGCT CGGCGACGAG |
| 20041 | ATGCCGGGCG AGGAGACCTG CCAGCACACC CGAGCCGCCG GTGATGACCA CCGTGCCGTC |
| 20101 | CGGGTCGAGC AGCGGTTCGG GCGTTTCCGC GGCGGCCGTG CGGGTGAACC GCGGCGCTTC |
| 20161 | GTACCGGCCG TCGGTGACGC GGACGTACGG CTCGGCCAGT GTCGTGGCGG CGGCCAGCGC |
| 20221 | CTCGATGGGG GTGTCGGTGC CGGTCTCCAC CAGCACGAAC CGGCCCGGGT GCTCGGCCTG |
| 20281 | GGCGGACCGG ACGAGGCCGG CGACCGCTCC TCCGACCGGT CCCGCGTCGA TCCGGACGAC |
| 20341 | GAGGGTGGTC TCCGCAGGGC CGTCCTCGGC GATCACCCGG TGCAGCTCGC CGAGCACGAA |
| 20401 | CTCGGTGAGC CGGTACGTCT CGTCGAGGAC ATCCGCGCCC GGTTCCGGGA GCGCGGAGAC |
| 20461 | GATGTGGACC GCGTCCGCAG GACCGGGCCC GGGAGTGGGC AGCTCGGTCC AGGAGAGGCC |
| 20521 | GTACAAGGAG TTCCGTACGA CGGCGGCGTC GCCGTCGACG TTCACCGGTC GCGCGGTCAG |
| 20581 | CGCGGCGACG GTCACCACCG GTTGGCCGAC CGGGTCCGTC GCATGCACGG CAGCGCCGTC |
| 20641 | CGGGCCCTGA GTGATCGTGA CGCGCAGCGT GGTGGCCCCG GTCGTGTGGA ACCGCACGCC |
| 20701 | GCTCCACGAG AACGGCAGCC GCACCTCCGC TTCCTGTTCC GCGAGCAGCG GCAGGCAGGT |
| 20761 | GACGTGCAAG GCCGCGTCGA ACAGCGCCGG GTGGACGCCA TAGTGCGGCG TGTCGTCCGC |
| 20821 | CTGTTCCCCG GCGATCTCCA CCTCGGCGTA CAGGGTTTCG CCGTCGCGCC AGGCGGTGCG |
| 20881 | CAGTCCCTGG AACGCTGGGC CGTAGCTGTA GCCGGTCTCG GCCAGCCGCT CGTAGAACGC |
| 20941 | GCTCACGTCG ACGCGTCGCG CGCCCGGCGG CGGCCACGCG GGCGGCGGGA CCGCCGCGAC |
| 21001 | GCTTCCGGCC CGGCCGAGGG TGCCGCTGGC GTGCCGGGTC CAGCTGTCCG TGCCCTCGGT |
| 21061 | ACGCGCGTGG ACGGTCACTC GCCGCCGTCC GGCCTCATCG GCCCCTTCGA CGGTCACCGA |
| 21121 | CACATCCACC GCGCCGGTCA CCGGCACCAC GAGCGGGGTC TCGATGACCA GTTCATCCAC |
| 21181 | CACCCCGCAA CCGGTCTCGT CACCGGCCCG GATGACCAGC TCCACAAACG CCGTACCCGG |
| 21241 | CAGCAGAACC GTGCCCCGCA CCGCGTGATC AGCCAGCCAG GGATGCGTAC GCAACGAGAT |
| 21301 | CCGGCCAGTG AGAACAACAC CACCACCGTC GTCGGCGGGC AGTGCTGTGA CGGCGGCCAG |
| 21361 | CATCGGATGC GCCGCCCCGG TCAGCCCGGC CGCGGACAGA TCGGTGGCAC CGGCCGCCTC |
| 21421 | CAGCCAGTAC CGCCTGTGCT CGAACGCGTA GGTGGGCAGA TCGAGCAGCC GTCCCGGCAC |
| 21481 | CGGTTCGACC ACCGTGTCCC AGTCCACTGC CGTGCCCAGG GTCCACGCCT GCGCCAACGC |
| 21541 | CGTCAGCCAC CGCTCCCAGC CGCCGTCACC GGTCCGCAAC GACGCCACCG TGTGAGCCTG |
| 21601 | TTCCATCGCC GGCAGCAGCA CCGGATGGGC GCTGCACTCC ACGAACACGG ACCCGTCCAG |
| 21661 | CTCCGCCACC GCCGCGTCCA GCGCGACGGG GCGACGCAGG TTCCGGTACC AGTAGCCCTC |
| 21721 | ATCCACCGGC TCGGTCACCC AGGCGCTGTC CACCGTGGAC CACCAGGOCA CCGACCCGGT |
| 21781 | CCCGCCGGAA ATCCCCTCCA GTACCTCGGC CAACTCGTCC TCGATGGCTT CCACGTGGGG |
| 21841 | CGTGTGGGAG GCGTAGTCGA CCGCGATACG GCGCACTCGC ACGCCTTCGG CCTCGTACCG |
| 21901 | CGTCACCACT TCTTCCACCG CGGACGGGTC CCCCGCCACC ACAGTCGAAG ACGGGCCGTT |
| 21961 | ACGCGCCGCG ATCCACACGC CCTCGACCAG GTCCACCTCA CCGGCCGGCA ACGCCACCGA |
| 22021 | AGCCATCGCC CCCCGCCCGG CCAGCCGCCC GGCGATCACC TGGCTGCGCA AGGCCACCAC |
| 22081 | GCGGGCGGCG TCCTCAAGGC TGAGGGCTCC GGCCACACAC GCCGCCGCGA TCTCGCCCTG |
| 22141 | GGAGTGTCCG ACCACCGCGT CCGGCACGAC CCCATGCGCC TGCCACAGCG CGGCCAGGCT |
| 22201 | CACCGCGACC GCCCAGCTGG CCGGCTGGAC CACCTCCACC CGCTCCGCCA CATCCGGCCG |
| 22261 | CGCCAACATC TCCCGCACAT CCCAGCCCGT GTGCGGCAAC AACGCCCGCG CACACTCCTC |
| 22321 | CATACGAGCC GCGAACACCG CAGAACACGC CATCAACTCC ACACCCATGC CCACCCACTG |
| 22381 | AGCACCCTGC CCGGGAAAGA CGAACACCGT ACGCGGCTGA TCCACCGCCA CACCCATCAC |
| 22441 | CCGGGCATCG CCCAACAACA CCGCACGGTG ACCGAAGACA GCACGCTCAC GCACCAACCC |
| 22501 | CTGCGCGACC GCGGCCACAT CCACACCACC CCCGCGCAGA TACCCCTCCA GCCGCTCCAC |
| 22561 | CTGCCCCCGC AGACTCACCT CACTCCGAGC CGACACCGGC AACGGCACCA ACCCATCGAC |
| 22621 | AGCCGACTCC CCACGCGACG GCCCGGGAAC ACCCTCAAGG ATCACGTGCG CGTTCGTACC |
| 22681 | GCTCACCCCG AAAGCGGAGA CACCGGCCCG GCGCGGACGT CCCGCGTCGG GCCACGCCCG |
| 22741 | CGCCTCGGTG AGCAGTTCCA CCGCGCCCTC GGTCCAGTCC ACATGCGACG ACGGCTCGTC |
| 22801 | CACATGCAGC GTCTTCGGCG CGATGCCATA CCGCATCGCC ATGACCATCT TGATGACACC |
| 22861 | GGCGACACCC GCAGCCGCCT GCGCATGACC GATGTTCGAC TTCAACGAAC CCAGCAGCAG |
| 22921 | CGGAACCTCA CGCTCCTGCC CGTACGTCGC CAGAATCGCG TGCGCCTCGA TGGGATCGCC |
| 22981 | CAGCGTCGTC CCCGTCCCGT GCGCCTCCAC CACGTCCACG TCGGCGGGGG CGAGCCCCGC |
| 23041 | CTTGTGGAGG GCCTGGCGGA TGACGCGCTG CTGGGAGGGG CCGTTGGGTG CGGAGATGCC |
| 23101 | GTTGGAGGCG CCGTCCTGGT TGACGGCGGA GGAGCGGACG ACCGCGAGGA CGGTGTGTCC |
| 23161 | GTTGCGCTCG GCGTCGGAGA GCTTTTCGAC GACGAGGACG CCGGCCCCCT CGGCGAAACC |
| 23221 | GGTGCCGTCC GCCGCGTCAG CGAACGCCTT GCACCGTCCG TCCGGCGCGA CGCCGCCCTG |
| 23281 | CCGGGAGAAC TCCACGAAGG TCTGTGGTGA TGCCATCACT GTGACACCAC CGACCAGCGC |
| 23341 | CAGCGAGCAC TCCCCGGTCC GCAGCGCCTG CCCGGCCTGG TGCAGCGCGA CCAGCGACGA |
| 23401 | CGAACACGCC GTGTCGACCG TGACCGCCGG ACCCTCCATG CCGAAGAAGT ACGACAGCCG |
| 23461 | TCCGGCGAGC ACCGCGGGCT GTGTGCTGTA GGCGCCGAAT CCGCCCAGGT CCGCGCCCGT |
| 23521 | GCCGTAGCCG TAGTAGAAGC CGCCGACGAA GACGCCGGTG TCGCTGCCGC GCAGGGTGTC |
| 23581 | CGGCACGATG CCGGCGTGTT CGAGCGCCTC CCAGGCGATT TCGAGGAGGA TCCGCTGCTG |
| 23641 | CGGGTCGAGT GCGGTGGCCT CGCGCGGACT GATGCCGAAG AACGCGGCAT CGAAGTCGGC |
| 23701 | GGCGCCCGCG AGTGCGCCGG CCCGCCCGGT GGCGGACTCG GCGGCGGCGT GCAGCGCGGC |
| 23761 | CACGTCCCAG CCGCGGTCGG TGGGGAAGTC GCCGATCGCG TCGCGGCCGT CCGCGACGAG |
| 23821 | CTGCCACAGC TCTTCCGGTG AGGTGACGCC GCCCGGCAGT CGGCAGGCCA TGCCGACGAC |
| 23881 | GGCGAGCGGC TCGTTCGCCG CGGCGCGCAG CGCGGTGTTC TCCCGGCGGA GCTGCGCGTT |
| 23941 | GTCCTTGACC GACGTCCGCA GCGCCTCGAT CAGGTCGTTC TCGGCCATCG CCTCATCCCT |
| 24001 | TCAGCACGTG CGCGATGAGC GCGTCTGCGT CCATGTCGTC GAACAGTTCG TCGTCCGGCT |
| 24061 | CCGCGGTCGT GGTGCTCGCG GGTGCCTGTG CCGGTGGTTC ACCGCCGTCC GGGGTCCCGT |
| 24121 | TGTCGTCCGG GGTCCCGTTG ACGTCCGGGG CCAGGAGGGT CAGCAGATGA CGGGTGAGCG |
| 24181 | CGCCGGCGGC GGGATAGTCG AAGACGAGCG TGGCCGGCAG CGGAATGCCG AGGGCCTCGG |
| 24241 | AGAGCCGGTT GCGCAGGCCG AGCGCGGTGA GCGAGTCGAC CCCGAGGTCC TTGAACGCCG |
| 24301 | TGGTGGCCGT GACCGCCGCC GCGTCGGTGT GGCCCAGCAG GGTGGCGGCG GTGTCGCGGA |
| 24361 | CGACGCCGAG CAGCACCTGT TCCCGTTCCT TGTGGGGCAG GTCCGGCAGG CGTTCCAGCA |
| 24421 | GGGAGCCGCC GTCGGTCGCG GAGCGCCGGG TGGGGCGCTG GATCGGTCGC CACAGCGGTG |
| 24481 | ACGGGTCGCC GGGCCCGGGT GGGGCGGTCG CCACGACCAC GGCTTCCCCG GTGGCGCACG |
| 24541 | CGGCGTCGAG GAGGTCGGTC AGCCGGTCCG CCGCGGCGGT GAACGCCACG GCCGGCAGGC |
| 24601 | CTTGTGCCCG GCGCAGGTCG GCCAGGGCCT GGAGCGGTCC GGCCGCCTCG CCGGACGGAA |
| 24661 | CGGCGAGAAC GAACGCGGTC AGGTCGAGGT CGCGGGTCAG GCGGTGCAGT TCCCAGGCCG |
| 24721 | ACTCGGCGGT GCCGTCCGCG TGGACGACCG CGGTCACCGG GGTTTCCGGC ACTGTGCCCG |
| 24781 | GCTCGTACCG GATCACTTCG GCGCCGTGTC CGCCGAGGTG TCCGGCGAGT TCCTCCGAAC |
| 24841 | CGCCCGCGAG GAGGACGGTG TCGCCGTACG AGGCCGCGGC CGTGGTGGGC GCGGCGGGGA |
| 24901 | CGAGGCGGGG CGCTTCGAGG CGCCCGTCGG CCAGGCGCAG GTGCGGTTCG TCGAGGCGGG |
| 24961 | AGAGGGCGGC GGCGCGGCGG GGGGTGACCG TGTCGGTGGT CTCCACGAGC ACGAGCCGGC |
| 25021 | CCGGTTCCGC GGTGTCGAGC AGTGCGGCGA CGGCACCGGC GACGGGCCCG GCCTCGGCGG |
| 25081 | ACACCACCAG CGTGGCGCCG GCGGTCCTCG GGTCGTCCAG TGCGGTACGG ACCTCGTCGG |
| 25141 | GACCGGATAC CGGGACGACG ATGACGTCGG GCGTGGCGTC GTCGCCGAGG TCGGTGTACC |
| 25201 | GGCGGGCCGT GGTGCCGGGT GCCGCCGGGG CCCGGACGCC GGTCCAGGTG CGCCGGAACA |
| 25261 | GCCGCACGTC CCCGTCCGGG CCCGTCGTGG CGGGGGGCCG GGTGATGAGC GAGCCGATCT |
| 25321 | GAGCCACCGG CCGTCCCAGT TCGTCGGCGA GGTGCACGCG GGCGCCGCCC TCGCCCTCGC |
| 25381 | CGTGGACGAA GGTGACGCGC AGTTTCGTGG CGCCGCTGGT GTGGACACGG ACGCCGGTGA |
| 25441 | ACGCGAACGG CAACCGTACC CCCGCGTTCT CGGCGGCCGC GCCGATGCTG CCCGCTTGCA |
| 25501 | GCGCGGTGAC GAGCAGCGCC GGGTGCAGTG TGTAGCGGGC GGCGTCCCTG GCGAGGGCGC |
| 25561 | CGTCGAGGGC GACTTCGGCG CAGACGGTGT CTCCGTGGCT CCACGCGGCG GACATGCCGC |
| 25621 | GGAACTCGGG GCCGAACTCG TATCCCGCGT CGTCGAGTCG CTGGTAGAAG GCCGCGACGT |
| 25681 | CGACCGGTTC CGCGTGCTCG GGCGGCCAGG GCCCCGGCGT GGTGGCCGGT TCGGTGGTGG |
| 25741 | CGATGCCGGC GAAGCCGGAG GCGTGGCGGG TCCATGTCCG GTCGCCGTCC GTCCGGGCGT |
| 25801 | GGACGCGCAC GGCACGGCGT CCGGTGTCGT CGGGCGCGGC GACGGTCACG CGCACCTGGA |
| 25861 | CGGCGCCGGT GGCGGGCAGG ACCAGCGGTG TCTCGACGAC CAGTTCGTCG AGCAGGTCGC |
| 25921 | AGCCTGCCTC GTCGGCGCCG CGTCCGGCCA ATTCCAGGAA GGCGGGTCCG GGCAGCAGTA |
| 25981 | CGGCGCCGTC GACGGAGTGA CCGGCCAGCC ATGGGTGGGT GGCCAGCGAG AACCGGCCGG |
| 26041 | TGAGCAGCAC CTCGTCGGAG TCGGGGAGCG CCACCGACGC GGCGAGCAGC GGGTGGTCGA |
| 26101 | CGGCGTCGAG TCCGAGGCCG GAAGCGTCCG TGCCGGCCGC GGTCTCGATC CAGTAGCGCT |
| 26161 | CATGGTGGAA GGCGTATGTG GGCAGGTCGT GTGCCGTCGC CGTCGCGGGG ACGACCGCCG |
| 26221 | CCCAGTCGAC GGGCACGCCG GTTGTGTGCG CCTCGGCCAG CGCGGTGAGC AGCCGGTGGA |
| 26281 | CTCCCCCGCC GCGGCGGAGC GTGGCGACGG TCGCGCCGTC GATCGCGGGC AGCAGCACGG |
| 26341 | GGTGCGCGCT GACCTCGACG AACACGGTGT CACCCGGCTC GCGGGCAGCG GTCACGGCCG |
| 26401 | TGGCGAAGCC TACGGGGTGG CGCATGTTGC GGAACCAGTA CTCGTCGTCG AGCGGCGCGT |
| 26461 | CGATCCAGCG TTCGTCGGCG GTGGAGAACC ACGGGATCTC GGGCGTGCGC GAGGTGGTGT |
| 26521 | CCGCGACGAT CCGCTGGAGT TCGTCGTACA GCGGGTCGAC GAACGGGGTG TGGGTCGGGC |
| 26581 | AGTCGACGGC GATGCGGCGC ACCCAGACGC CGCGGGCCTC GTAGTCGGCG ATCAGCGTTT |
| 26641 | CGACGGCGTC CGGGCGCCCG GCGACGGTCG TGGTGGTGGC GCCGTTGCGG CCCGCGACCC |
| 26701 | AGACGCCGTC GATCCGGGCG GCATCCGCCT CGACGTCGGC GGCCGGGAGC GCGACCGAGC |
| 26761 | CCATCGCGCC GCGTCCGGCG AGTTCGCGCA GGAGCAGGAG AACGCTGCGC AGCGCGACGA |
| 26821 | GGCGGGCACC GTCCTCCAGG GTGAGCGCTC CGGCGACACA GGCCGCGGCG ATCTGGCCCT |
| 26881 | GGGAGTGTCC GATGACGGCG TCCGGGCGTA CGCCCGCGGC CTCCCACACG GCGGCCAGCG |
| 26941 | ACACCATGAC GGCCCAGCAG ACGGGGTGCA CGACGTCGAC GCGGCGGGTC ACCTCCGGGT |
| 27001 | CGTCGAGCAT GGCGATGGGG TCCCAGCCCG TGTGCGGGAT CAGCGCGTCG GCGCATTGGC |
| 27061 | GCATCCTGGC GGCGAACACC GGGGAGGCCG CCATCAGTTC GACGCCCATG CCGCGCCACT |
| 27121 | GCGGTCCTTG TCCGGGGAAG ACGAAGACGG TGCGCGGCTC GGTGAGCGCC GTGCCGGTGA |
| 27181 | CGACGTCGTC GTCGAGCAGC ACGGCGCGGT GCGGGAACGT CGTACGCCTG GCGAGCAGGC |
| 27241 | CCGCGGCGAT GGCGCGCGGG TCGTGGCCGG GACGGGCGGC GAGGTGCTCG CGGAGTCGGC |
| 27301 | GGACCTGGCC GTCGAGGGCC GTGGCGGTCC GCGCCGAGAC GGGCAGTGGT GTGAGCGGCG |
| 27361 | TGGCGATCAG CGGCTCACCG GGCTTCGAGG CCGACGGCTC CTCGGCCGGC GGCTCCCCGG |
| 27421 | CCGGGTGGGC TTCCAGCAGG ACGTGGGCGT TGGTGCCGCT GACGCCGAAG GAGGACACAC |
| 27481 | CGGCGCGCCG CGGGCGGTCG GTCTCGGGCC AGGGCCGGGC ATCGGTGAGG AGTTCGACGG |
| 27541 | CGCCGGCCGT CCAGTCGACG TGCGAGGACG GCGTGTCCAC GTGCAGGGTG CGCGGCAGGG |
| 27601 | TGCCGTGCCG CATGGCGAGG ACCATCTTGA TGACACCGGC GACACCCGCG GCGGCCTGAG |
| 27661 | TGTGGCCGAT GTTGGACTTC AGCGAGCCCA GCAGCACCGG GGTGTCGCGC CCCTGCCCGT |
| 27721 | AGGTGGCCAG CACCGCCTGT GCCTCGATGG GATCGCCCAG CCTGGTGCCG GTGCCGTGCG |
| 27781 | CCTCCACGGC GTCCACGTCC GCCGGGGTGA GCCCGGCGTT GGCCAGGGCC TGCCGGATCA |
| 27841 | CCCGCTCCTG CGAGGGCCCG TTCGGCGCCG ACAACCCGTT GGAAGCACCG TCCTGGTTGA |
| 27901 | CCGCCGAACC CCGGACAACC GCCAGCACAC GGTGGCCGTT GCGCTCGGCA TCGGAGAGCC |
| 27961 | TCTCGACGAT CAGCACACCG GACCCCTCGG CGAAACCGGT GCCGTCAGCC GCATCCGCGA |
| 28021 | ACGCCTTGCA GCGCGCGTCG GGCGCGAGAC CCCGCTGCTG GGAGAACTCG ACGAAGCCGG |
| 28081 | ACGGCGAGGC CATCACCGTG ACGCCGCCGA CCAGGGCGAG CGAGCATTCG CCGGAGCGCA |
| 28141 | GTGACTGCCC GGCCTGGTGC AGCGCCACCA GCGACGACGA ACACGCCGTG TCGACCGTGA |
| 28201 | CCGCCGGACC CTCCAGACCG TAGAAGTACG ACAGCCGACC GGACAGCACA CTGGTCTGGG |
| 28261 | TGCCGGTCGC GCCGAAACCG CCCAGGTCGG TGCCGAGTCC GTACCCGTCG GAGAAGGCGC |
| 28321 | CCATGAACAC GCCGGTGTCG CTTCCGCGCA GCGACTCCGG GAGGATCCCG GCGTGTTCCA |
| 28381 | GCGCCTCCCA CGAGGTCTCC AGGACCAGAC GCTGCTGCGG GTCCATCGCC AGCGCCTCAC |
| 28441 | GCGGACTGAT CCCGAAGAAC GCCGCGTCGA AGTCCGCCAC CCCGGCGAGG AAGCCACCAT |
| 28501 | GACGCACGGT CGACGTGCCC GGATGATCCG GATCGGGATC GTACAGCCCG TCCACGTCCC |
| 28561 | AACCACGGTC CGTCGGAAAC GCCGTGATCC CGTCACCACC CGACTCCAGC AGCCGCCACA |
| 28621 | AGTCCTCCGG CGACGCGACC CCACCCGGCA GCCGGCAGGC CATCCCCACG ATCGCCAACG |
| 28681 | GCTCGTCCTG CCGGACGGCC GCGGTCGTGG TGCGGGTCGG CGATGCCGTC CGGCCGGACA |
| 28741 | GCGCCGCGGT GAGCTTCGCC GCGACGGCGC GCGGCGTCGG GAAGTCGAAG ACCGCGGTGG |
| 28801 | CGGGCAGCCG TACGCCCGTC GCCTCGGTGA AGGCGTTGCG CAGCCGGATC GCCATGAGCG |
| 28861 | AGTCGACGCC GAGTTCCTTG AACGTGGCGG TCGCCTCGAC CCGTGCGGCA CCGTCGTGGC |
| 28921 | CGAGTACGGC CGCGGTGCAC TGCCGGACGA CGGCGAGCAC GTCCTTTTCG GCGTCCGCGG |
| 28981 | CGGAGAGCCG CGCGATCCGG TCGGCGAGGG TGGTGGCGCC GGCCGCCCGG CGCCGCGGCT |
| 29041 | CCCGGCGCGG TGCGCGCAGC AGGGGCGAGC TGCCGAGGCC GGCCGGGTCG GCGGCGACCA |
| 29101 | GCGCCGGGTC CGAGGACCGC AACGCCGCGT CGAACAGCGT CAGTCCGCCT TCGGCGGTCA |
| 29161 | GCGCCGTCAC GCCGTCGCGG CGCATGCGGG CGCCGGTGCC GACCGTCAGC CCGCTCTCCG |
| 29221 | GTTCCCACAG GCCCCAGGCC ACGGACAACG CGGGCAGTCC GGCTGCCCGG CGCTGTTCGG |
| 29281 | CCAGCGCGTC GAGGAACGCG TTCGCGGCCG CGTAGTTGCC CTGTCCGGGG CTGCCGAGCA |
| 29341 | CACCGGCGGC CGACGAGTAG AGGACGAACG CGGCCAGTTC CGTGTCCTGG GTGAGTTCGT |
| 29401 | GCAGGTGCCA CGCGGCGTCC ACCTTCGGGC GCAGCACCGT CTCGAGCCGG TCGGGGGTGA |
| 29461 | GCGCGGTGAG GACGCCGTCG TCGAGGACGG CCGCGGTGTG CACGACGGCC GTGAGCGGGT |
| 29521 | GCGCCGGGTC GATCCCCGCC AGTACGGAGG CGAGTTCGTC CCGGTCGGCG ACGTCGCAGG |
| 29581 | CGATCGCCGT GACCTCGGCG CCGGGCACGT CGCTCGCCGT GCCGCTGCGC GACAGCATCA |
| 29641 | GCAGCCGGCG CACGCCGTGG CGTTCGACGA GGTGGCGGCT GATGATGCCG GCCAGCGTCC |
| 29701 | CGGAGCCACC GGTGACGAGC ACGGTGCCGT CCGGGTCGAG CGCCGGAGCG TCACCCGCCG |
| 29761 | GGACCGCCGG GGCCAGACGG CGGGCGTACA CCTGGCCGTC ACGCAGCACC ACCTGGGGCT |
| 29821 | CATCGAGCGC GGTGGCCGCT GCGAGCAGCG GCTCGGCGGT GTCCGGGGCG GCGTCGACGA |
| 29881 | GGACGATCCG GCCGGGGTGT TCGGCCTGCG CGGTCCGCAC CAGTCCGGCG GCCGCGGCCG |
| 29941 | ACGCGAGACC GGGCCCGGTG TGGACGGCCA GGACCGCGTC GGCGTACCGG TCGTCGGTGA |
| 30001 | GGAAGCGCTG CACGGCGGTC AGGACGCCGG CGCCCAGTTC GCGGGTGTCG TCGAGCGGGG |
| 30061 | CACCGCCGCC GCCGTGCGCG GGGAGGATCA CCACGTCCGG GACCGTCGGG TCGTCGAGGC |
| 30121 | GGCCGGTCGT CGCGGTCGTG GGCGGCAGCT CCGGGAGCTC GGCCAGCACC GGGCGCAGCA |
| 30181 | GGCCCGGAAC GGCTCCCGTG ATCGTCAGGG GGCGCCTGCG CACGGCGCCG ATGGTGGCGA |
| 30241 | CGGGCCCGCC GGTCTCGTCC GCGAGGTGTA CGCCGTCAGC GGTGACGGCG ACGCGTACCG |
| 30301 | CCGTGGCGCC GGTGGCGTGG ACGCGGACGT CGTCGAACGC GTACGGAAGG TGGTCCCCTT |
| 30361 | CCGCGGCGAG GCGGAGTGCG GCGCCGAGCA GCGCCGGGTG CAGGCCGTAC CGTCCGGCGT |
| 30421 | CGGCGAGCTG TCCGTCGGCG AGGGCCACTT CCGCCCAGAC GGCGTCGTCG TCGGCCCAGA |
| 30481 | CGGCGCGCGG GCGGGGCAGC GCGGGCCCGT CCGTGTACCC GGCTCGGGCC AGACGGTCGG |
| 30541 | CGATGTCGTC GGGGTCCACC GGCCGGGCCG TGGCGGGCGG CCACGTCGAC GGCATCTCCC |
| 30601 | GCACGGCCGG GGCCGTCCGC GGGTCGGGGG CGAGGATTCC GTGCGCGTGC TCGGTCCACT |
| 30661 | CCCCCGCCGC GTGCCGCGTG TGCACGGTGA CCGCGCGGCG GCCGTCCGCC CCGGGCGCGC |
| 30721 | TCACCGTGAC GGAGAGCGCG AGCGCACCGG ACCGCGGCAG CGTGAGGGGG GTGTCCACGG |
| 30781 | TGAACGTGTC GAGGGCGCCG CAGCCGGCTT CGTCGCCCGC CCGGATCGCC AGATCCAGGA |
| 30841 | GGGCCGCGGC GGGCAGCACC GCGAGGCCGT GCAGGGAGTG CGCCAGCGGA TCGGCGGCGT |
| 30901 | CGACCCGGCC GGTGAGCACC AGGTCGCCGG TGCCGGGCAG GGTGACCGCC GCGGTCAGCG |
| 30961 | CCGGGTGCGC GACCGGCGTC TGTCCGGCCG GGGCCGCGTC GCCCGCGGTC TGGGTGCCGA |
| 31021 | GCCAGTAGCG GACCCGCTCG AACGGGTACG TCGGCGGGTG CGAGGCGCGT GCCGGCGCGG |
| 31081 | GGTCGATGAC CTTCGGCCAG TCGACCGTGA CGCCGTCGGT GTGCAGCCGG GCGAGCGCGG |
| 31141 | TCAGGGCGGA TCGCGGTTCG TCGTCGGCGT GCAGCATCGG GATGCCGTCG ACGAGTCGGG |
| 31201 | TCAGGCTCCG GTCCGGGCCG ATCTCCAGGA GCACCGCCCC GTCGTGCGCG GCGACCTGTT |
| 31261 | CCCCGAACCG GACGGTGTCG CGGACCTGTC GTACCCAGTA CTCCGGCGTG GTGCAGGCGG |
| 31321 | CGCCCGCGGC CATCGGGATC CTCGGCTCGT GGTACGTCAG GCTCTCCGCG ACCTTGCGGA |
| 31381 | ACTCCTCGAG CATCGGCTCC ATCCGCGCCG AGTGGAACGC GTGGCTGGTC CGCAGGCGGG |
| 31441 | TGAAGCGGCC GAGCCGGGCC GCGACGTCGA GCACCGCCTC CTCGTCACCG GAGAGGAGGA |
| 31501 | TCGACGCGGG CCCGTTGACC GCGGCGATCT CCACGGCGTC CCGCAGCAGC GGCAGCGCGT |
| 31561 | CCCGTTCCGA CGCGATCACG GCGGCCATCG CCCCGCCGGA CGGCAGCGCC TGCATCAGGC |
| 31621 | GGGCCCGTGC GGACACCAGC CTGCACGCGT CCTCCAGGGA CCAGACGCCG GCGACGTACG |
| 31681 | CGGCGGCCAG CTCGCCGATC GAATGGCCCA CGAAGGCGTC CGGGCGTACG CCCCACGCCT |
| 31741 | CGAGCTGTGC GCCGAGTGCG ACCTGGAGCG CGAACACCGC GGGCTGGGCG TACCCGGTGT |
| 31801 | CGTGGAGGTC GAGCCCGGCG GGCACGTCGA GGGCGTCCAG CACCTCGCGG CGAGTGCGGG |
| 31861 | CGAAGACGTC GTAGGCGGCG GCCAGTCCGT CGCCCATGCC GGGACGTTGT GAGCCCTGTC |
| 31921 | CGGAGAAGAG CCACACGAGG CGGCGGTCCG GTTCTGCGGC GCCGGTGACC GTGTCGGTGC |
| 31981 | CGATCAGCGC GGCCCGGTGC GGGAAGGCCG TGCGGGCGAG CAGGGCCGCG GCCACCGCGC |
| 32041 | GCTCGTCCTC CTCGCCGGTG GCGAGGTGGG CGCGCAGGCG GTGTACCTGT GCGTCGAGTG |
| 32101 | CCTGCGGGGT GCGTGCCGAG AGCAGCAGGG GCAGCGGTCC GGTGTCGGGT GCCGGGGCGG |
| 32161 | GTTCGGGGGC CGGTCGGGGG TGGCTTTCGA GGATGATGTG AGCGTTGGTG CCGCTAACGC |
| 32221 | CGAAGGAGGA CACCCCGGCG CGCCGTGGGC GGTCGGTTTC GGGCCAGGGG CGGGCGTCGG |
| 32281 | TGAGGAGTTC GACGGCGCCG GCCGTCCAGT CGACGTGCGA GGACGGCGTG TCCACGTGCA |
| 32341 | GGGTGCGCGG CAGGGTGCCG TGCCGCATGG CGAGGACCAT CTTGATGACA CCGGCGACGC |
| 32401 | CCGCGGCGGC CTGAGTGTGG CCGATGTTGG ACTTCAGCGA GCCCAGCAGC ACCGGGGTGT |
| 32461 | CGCGATGCTG CCCGTAGGTG GCCAGTACCG CCTGCGCCTC GATGGGGTCG CCCAGCCTGG |
| 32521 | TCCCGGTGCC ATGCGCCTCG ACAGCGTCCA CATCCGCCGG GGTGAGCCCG GCGTTGGCCA |
| 32581 | GCGCCTGCCG GATCACCCGC TCCTGCGACG GCCCGTTCGG CGCCGACAAC CCGTTGGAAG |
| 32641 | CACCGTCCTG GTTGACCGCC GAACCACGCA CGACCGCCAG GACATTGTGG CCGTGCCGCT |
| 32701 | CGGCGTCGGA GAGCCTCTCG ACGATCAGCA CACCGGATCC CTCGGCGAAA CCGGTGCCAT |
| 32761 | CAGCCGCATC CGCGAACGCC TTGCAGCGGC CGTCCGGGGA GAGGCCCCGC TGCTGGGAGA |
| 32821 | AGTCCACGAA GCCGGACGGC GAGGCCATCA CCGTGACGCC GCCGACCACG GCGAGCGAGC |
| 32881 | ACTCCCCCGA GCGCAGCGAC TGCCCGGCCT GGTGCAGCGC CACCAGCGAC GACGAACACG |
| 32941 | CCGTGTCCAC CGTGACCGCC GGACCCTCCA AACCGTAGAA GTACGACAGC CGACCGGACA |
| 33001 | GCACACTGGT CTGGGTGCTG GTGGCACCGA AACCGCCGCG GTCGGCTCCA GTGCCGTACC |
| 33061 | CGTAGAAGTA GCCGCCCATG AACACGCCGG TGTCGCTTCC GCGCAGCGAC TCCGGGAGGA |
| 33121 | TCCCGGCGTG TTCCAGCGCC TCCCACGAGG TCTCCAGGAC CAGACGCTGC TGCGGGTCCA |
| 33181 | TCGCCAGCGC CTCACGCGGA CTGATCCCGA AGAACGCCGC GTCGAAGTCC GCCACCCCGG |
| 33241 | CGAGGAAGCC ACCATGACGC ACGGTCGACG TGCCCGGATG ATCCGGATCG GGATCGTACA |
| 33301 | GCCCGTCCAC GTCCCAACCA CGGTCCGTCG GAAACGCCGT GATCCCGTCA CCACCCGACT |
| 33361 | CCAGCAGCCG CCACAAGTCC TCCGGCGACG CGACCCCACC CGGCAGCCGG CAGGCCATCC |
| 33421 | CCACGATCGC CAACGGCTCG TCCTGCCGGA CGGCCGCGGT CGGGGTACGC CGCCGGGTGG |
| 33481 | TGGCCCGCGC GCCGGCCAGT TCGTCCAGGT GGGCGGCGAG CGCCTGCGCC GTGGGGTGGT |
| 33541 | CGAAGACGAG CGTAGCGGGC AGCGTCAGGC CCGTCGCGTC GGCCAGCCGG TTGCGCAGTT |
| 33601 | CGACGCCGGT CAGCGAGTCG AAGCCCACTT CCCTGAACGC GCGCGCGGGT GCGATGGCGT |
| 33661 | GGGCGTCGCG GTGGCCGAGC ACCGCGGCAG CGCTGGTACG GACGAGGTCG AGCATGTCGC |
| 33721 | GCGCGGCCGG AGGTGCGGAC GTGCGCCGGA CGGCCGGCAC GAGGGTGCGT AGGACCGGCG |
| 33781 | GGACCCGGTC GGACGCGGCG ACGGCGGCGA GGTCGAGCCG GATCGGCACG AGCGCGGGCC |
| 33841 | GGTCGGTGTG CAGGGCCGCG TCGAACAGGG CGAGCCCCTG TGCGGCCGTC ATCGGGGTCA |
| 33901 | TGCCGTTGCG GGCGATGCGG GCCAGGTCGG TGGCGGTCAG CCGCCCGCCC ATCCCGTCCG |
| 33961 | CCGCGTCCCA CAGTCCCCAG GCGAGCGAGA CGGCGGGCAG CCCCTGGTGG TGCCGGTGGC |
| 34021 | GGGCGAGCGC GTCGAGGAAC GCGTTGCCGG TCGCGTAGTT GGCCTGACCC GCGCCGCCGA |
| 34081 | ACGTGGCGGA TATGGACGAG TACAGGACGA ACGCGGCCAG GTCGAGATCG CGCGTCAGCT |
| 34141 | CGTGCAGGTG CCAGGCGACG TCCGCCTTGA CCCGCAGCAC GGCGTCCCAC TGCTCCGGCC |
| 34201 | GCATGGTCGT CACGGCCGCG TCGTCGACGA TCCCGGCCAT GTGCACGACG GCGCGCAGCC |
| 34261 | GCTGGGCGAC GTCGGCGACG ACTGCGGCCA GCTCGTCGCG GTCGACGACG TCGGCGGCCA |
| 34321 | CGTACCGCAC GCGGTCGTCC TCCGGCGTGT CGCCGGGCCG GCCGTTGCGG GACACCACGA |
| 34381 | CGACCTCGGC GGCCTCGTGC ACGGTGAGCA GGTGGTCCAC GAGGAGGCGG CCGAGCCCGC |
| 34441 | CGGTGCCGCC GGTGACGAGG ACGGTCCCGC CGGTCAGCGG GGAGGTTCCG GTGGCCGCGG |
| 34501 | CGACACGGCG CAGACGGGCC GCACGCGCTG TGCCGTCGGC GACCCGGACG TGCGGCTCGT |
| 34561 | CGCCGGCGGC GAGCCCGGCC GCTATGGCGG CGGGCGTGAT CTCGTCCGCT TCGATCAGGG |
| 34621 | CGACGCGGCC GGGATGCTCC GTCTCCGCCG TCCGGACCAG GCCGCCGAGC GCTTCCTGCG |
| 34681 | CGGGATCGCC GGTACGGGTG GCCACGATGA GCCGGGATCG CGCCCAGCGC GGCTCGGCGA |
| 34741 | GCCAGGTCTG CACGGTGGTG AGCAGGTCGC GGCCCAGCTC CCGGGTCCGG GCGCCGGGCG |
| 34801 | AGGTGCCCGG GTCGCCGGGT TCCACGGCCA GGACCACGAC CGGGGGGTGC TCGCCGTCGG |
| 34861 | GCACGTCGGC GAGGTACGTC CAGTCGGGGA CGGGTGACGC GGGCACGGGC ACCCAGGCGA |
| 34921 | TCTCGAACAG CGCCTCGGCA TCGGGGTCGG CGGCCCGCAC GGTCAGGCTG TCGACGTCAA |
| 34981 | GGACCGGTGA GCCGTGCTCG TGCGTGGCGA CGATGCGGAC CATGTCGGGG CCGACGCGTT |
| 35041 | CCAGCAGCAC GCGCAGCGCG GTCGCGGCGC GCGCGTGGAT CCTCACGCCG GACCAGGAGA |
| 35101 | ACGCCAGCCG GCGCCGCTCC GGGTCCGTGA AGACCGTCCC GAGGGCGTGC AGGGCCGCGT |
| 35161 | CGAGCAGCAC GGGGTGCAGC CCGTACCGGG CGTCGGTGAG CTGTTCGGCG AGGCGGACCG |
| 35221 | ACGCGTAGGC GCGGCCCTCC CCCGTCCACA TCGCGGTCAT GGCCCGGAAC GCGGGCCCGT |
| 35281 | ACGAGAGCGG CAGCGCGTCG TAGAAGCCGG TCAGGTCGGC CGGGTCGGCG TCGGCGGGCG |
| 35341 | GCCAGTCCAC GGGCTCCGCC GGACCGCCAG TGTCCACGCT CAGCGCTCCG GTCGCACTGA |
| 35401 | GCGCCCAGGG GCCCGTGCCG GTACGGCTGT GCAGACTCAC CGACCGCCGT CCGGACACCT |
| 35461 | CGGTTCCGAC GGTGGCCTGG ATCTCCGTGT CGCCGTCGCC GTCGACCACC ACCGGCGCGA |
| 35521 | CGATGGTCAG CTCCGCGATC TCCGGCGTGC CGAGCCGGGC TCCCGCTTCG GCGAGCAGTT |
| 35581 | CCACGAGCGC CGAGCCGGGC ACGATGACCC GGCCGTCCAC CTCGTGGTCG GCGAGCCAGG |
| 35641 | GCTGACGGCG TACCGAGACA CCGCGGTGGC CAGCGCGCCC TCGCCGTCGG GCGAGGTCGA |
| 35701 | CCCACGAGCC GAGCAGCGGG TGGCCGGACG TTCCCGCCGG TTCCGCGTCG ATCCAGTAGC |
| 35761 | GGTCACGGCG GAACGGGTAC GTGGGCAGCG GCACCACCCG ACGCGTCGCG AACGACCAGG |
| 35821 | TGACGGGCAC GCCCCGGACC CAGAGCGCGG CGAGCGACCG AGTGAAGCGG TCCAGGCCGC |
| 35881 | CCTCGCCTCG CCGCAGTGTG CCGGTGACGA CCGTATGCGC ATGCCCGGCG AGCGTGTCCT |
| 35941 | CCAGTGCGGT GGTGAGCACG GGATGCGCGC TGACCTCGAC GAACGCGCGG TATCCGCGGT |
| 36001 | CCGCCAGGTG GCCGGTCGCG GCGGCGAACC GAACGGTGCG GCGCAGGTTG TCGTACCAGT |
| 36061 | AGGCGGCGTC CGCGGGCCGG TCCAGCCACG CCTCGTCCAC GGTGGAGAAG AACGGGACGT |
| 36121 | CCGGCGTGCG CGGAGTGATG CCGGCGAGAG CGTCGAGCAG CGCGCCGCGG ATCGTTTCGA |
| 36181 | CATGCGCGGT GTGCGACGCG TAGTCGACGG CGATCCGGCG GGCGCGGGGG GTGGCGGCCA |
| 36241 | GCAGCTCCTC CACGGCGTCG GCCGCACCGG CGACAACGAT CGACGCGGGT CCGTTGACCG |
| 36301 | CGGCGACCTC CAGGCGCCCG GCCCACACGG CGGCGTCGAA GTCGGCGGGC GGCACCGAGA |
| 36361 | CCATGCCGCC CTGCCCGGCC AGTTCGGTGG CGACGAGTCG GCTGCGCACC GCGACGACCT |
| 36421 | TCGCGGCGTC GTCCAGGGTG AGCACCCCGG CGACGCAGGC CGCGGCGACT TCGCCCTGGG |
| 36481 | AGTGGCCGAC GACCGCGGCC GGGGCGACCC CGTGCGCACG CCACAGCTCC GCCAGCGCCA |
| 36541 | CCATCACCGC GAACGACGCG GGCTGCACGA CATCGACCCG GTCGAACGCG GGCGCTCCGG |
| 36601 | GCCGCTGGGC GATGACGTCC AGCAGGTCCC ATCCGGTGTG CGGGGCGAGC GCCGTGGCGC |
| 36661 | ACTCGCGGAG CCGCCGGGCG AACACGGGCT CGGTGGCGAG CAGTTCGGCA CCCATGCCGG |
| 36721 | CCCACTGGGA GCCCTGCCCG GGGAACGCGA ACACGACACG TGTGTCGGTG ACGTCGGCGG |
| 36781 | TTCCCGTCAC GGCCCCCGGC ACTTCGGCAC CACGGGCGAA CGCCTCCGCC TCTCGGGCCG |
| 36841 | GCACGACCGC CCGGTGGCGC ATGGCCGTCC GGGTGGTGGC GAGCGAGTGG CCGACCGCGG |
| 36901 | CCGCGGCGCC AGTGAGCGGG GCCAGCTGTC CCGCGACGTC CCGCAGTCCC TCCGGGGTCC |
| 36961 | GGGCCGACAT CGGCCAGACC ACGTCCTCGG GCACCGGCTC GGCTTCGGGT GCGGACACGG |
| 37021 | GTGCGGGCGC GGCGGGGGGC CCGGCCTCCA GGACGACATG GGCGTTGGTG CCGCTGATGC |
| 37081 | CGAACGACGA GACACCCGCA CGCCGGGCGC GCCCGGTGAC CGGCCACGGC TCACTGCGGT |
| 37141 | GCAGCAGCCG GATGTCGCCG TCCCAGTCGA CGTGCCGGGA CGGCTCGTCG ACGTGCAGCG |
| 37201 | TGCGCGGCAG GACGCCGTGC CGCATCGCCA TGACCATCTT GATGACGCCG GCGACGCCGG |
| 37261 | CCGCGGCCTG GGTGTGGCCG ATGTTCGACT TGAGCGAGCC GATCAGCAGC GGATGCACGC |
| 37321 | GTTCGCGCCC GTAGGCCACT TGCAGGGCCT GGGCCTCGAC GGGGTCGCCG AGACGGGTGC |
| 37381 | CGGTGCCGTG TGCCTCCACG GCGTCGACGT CACCCGGCGC CAGGCCGGCG TCGGCGAGCG |
| 37441 | CACGCTGGAT GACGCGCTGC TGCGCAGGCC CGTTCGGGGC GGACAGCCCG TTCGACGCGC |
| 37501 | CGTCGGAGTT GACCGCGGAG CCGCGCACCA GCGCCAGCAC GGGGTGGCCG TGGCGGGTGG |
| 37561 | CGTCGGAGAG CCGCTCCAGC ACCAGGACAC CGGCGCCCTC GGCGAAGCTC GTGCCGTCCG |
| 37621 | CGGTGTCCGC GAAGGCCTTG GCACGGCCGT CGGGGGCGAG CCCGCGCTGC CGGGAGAACT |
| 37681 | CGACGAACCC GGTCGTCGTC GCCATCACCG TGACACCGCC GACCAGGGCG AGCGAGCACT |
| 37741 | CCCCCGAGCG CAGCGACCGC GCGGCCTGGT GCAGCGCCAC CAGCGACGAC GAACACGCCG |
| 37801 | TGTCGACGGT GACCGACGGG CCCTCCAGAC CGAAGTAGTA CGAGAGCCGC CCGGAGAGAA |
| 37861 | CGCTGGTCGG CGTGCCGGTC GCCCCGAAAC CGCCCAGGTC CACGCCCGCG CCGTAGCCCT |
| 37921 | GGGTGAACGC GCCCATGAAT ACGCCGGTGT CGCTGCCGCG GACGCTTTCG GGCAGGATGC |
| 37981 | CCGCTCGTTC GAACGCCTCC CACGACGCTT CGAGGACCAG ACGCTGCTGC GGGTCCATCG |
| 38041 | CCAGCGCCTC ACGCGGGCTG ATCCCGAAGA ACGCGGCGTC GAAGTCGGCG GCGCCGGTGA |
| 38101 | GGAAGCCGCC GTGACGCACG GAAACCTTGC CGACCGCGTC GGGGTTCGGG TCGTAGAGCG |
| 38161 | CGGCGAGGTC CCAGCCGCGG TCGGCGGGGA ACTCGGTGAT CGCGTCCCCG CCGGAGTCGA |
| 38221 | CCAGCCGCCA CAGGTCCTCC GGTGACCGCA CGCCACCGGG CATCCGGCAC GCCATGGCCA |
| 38281 | CGATCGCCAG CGGCTCGTTC CCCGCCACCG TCGGTGCGGG CACTGTCGCC GCCGGAGCGG |
| 38341 | CAGGGGCCGG CTCACCCCGC CGTTCCTCAT CCAGGCGGGC GGCGAGCGCG GCCGGTGTCG |
| 38401 | GGTGGTCGAA GACGGCCGTC GCGGAGAGCC GTACCCCCGT CGTCTCGGCG AGGCTGTTGC |
| 38461 | GCAACCGGAC ACCGCTGAGC GAGTCGATGC CGAGGTCCTT GAACGCCGTC GTGGGCGTGA |
| 38521 | TCTCGGAGGC GTCGGCGTGG CCGAGCACGG CGGCCGTGGC CGCACACACG ATGGCCAGCA |
| 38581 | GGTCACGATC GCGGTCGCGG TCGCGGTCGC GGTTGTCCTC CGCACGGGCG GCGATGCGGC |
| 38641 | GCTCGGTCCG CTGCCGGACG GGCTCGGTGG GAATCGCCGC GACCATGAAC GGCACGTCCG |
| 38701 | CGGCGAGGCT CGCGTCGATG AAGTGGGTGC CCTCGGCCTC GGTGAGCGGC CGGAACCCGT |
| 38761 | CGCGCACCCG GTGCCGGTCG GCGTCGTCAA GTTGTCCGGT GAGGGTGCTG GTGGTGTGCC |
| 38821 | ACATGCCCCA GGCGATGGAG GTGGCGGGTT GGCCGAGGGT GTGGCGGTGG GTGGCGAGGG |
| 38881 | CGTCGAGGAA GGCGTTGGCG GCGGCGTAGT TTCCTTGTCC GGGGCTGCCG AGGACGGCGG |
| 38941 | CGGCGCTGGA GTAGAGGACG AAGTGGGTGA GGGGTTGGTT TTGGGTGAGG TGGTGCAGGT |
| 39001 | GCCAGGCGGC GTTGGCTTTG GGGTGGAGGA CGGTGGTGAG GCGGTCGGGG GTGAGGGCGT |
| 39061 | CGAGGATGCC GTGGTCGAGG GTGGCGGCGG TGTGGAAGAC GGCGGTGAGG GGTTGGGGGA |
| 39121 | TGTGGGCGAG GGTGGTGGCG AGTTGGTGGG GGTCGCCGAC GTCGCAGGGG AGGTGGGTGC |
| 39181 | CGGGGGTGGT GTCGGGGGGT GGGGTGCGGG AGAGGAGGTA GGTGTGGGGG TGGTTCAGGT |
| 39241 | GGCGGGCGAG GATGCCGGCG AGGGTGCCGG AGCCGCCGGT GATGATGATG GCGTGTTCGG |
| 39301 | GGTTGAGGGG GGTGGTGGTG GGTGGGGTGG TGGTGTGGAG GGGGGTGAGG TGGGGTCGGT |
| 39361 | GGAGGGTGTG GTGGGTGAGG CGGAGGTGGG GGTGGTCGAG GGTGGCGAGT TGGGCCAGGG |
| 39421 | GGAGGGGAGT GTGGGGGTGG TCGGTTTCGA TGAGGCGGAT GCGGTGGGGG TGTTCGTTCT |
| 39481 | GGGCGGTGCG GGTGAGGCCG GTGACGGTGG CGCCGGCGGG GTCGGTGGTG GTGTGGACGA |
| 39541 | TGAGGGTGTG GTCGGTGGTG GTGAGGTGGT GTTGCAGGGC GGTCAGGACG CGGGTGGCGC |
| 39601 | GGGTGTGGGC GCGGGTGGGT ATGTCCTCGG GGTCGTCGGG GTGGGCGGCG GTGATCAGGA |
| 39661 | CGTGTCCCTC GGGCAGGTCA CCGTCGTAGA CCGCCTCGGC GACCGCGAGC CACTCCAACC |
| 39721 | GGAGCGGGTT CGGCCCCGAC GGGGTGTCGG CCCGCTCCCT CAGCACCAGC GAGTCCACCG |
| 39781 | ACACGACAGG ACGGCCATCC GGGTCGGCCA CGCGCACGGC GACGCCGGCC TCCCCCCGGG |
| 39841 | TGAGGGCGAC GCGCACCGCG GCGGCCCCGG TGGCGTTCAG GCGCACGCCC GTCCAGGAGA |
| 39901 | ACGGCAGCTC GATCCCGCCG CCCGCGTCGA GGCGCCCGGC GTGCAGGGCC GCGTCGAGCA |
| 39961 | GTGCCGGATG CACACCGAAA CCGTCCGCCT CGGCGGCCTG CTCGTCGGGC AGCGCCACCT |
| 40021 | CGGCATACAC GGTGTCACCA TCACGCCAGG CAGCCCGCAA CCCCTGGAAC GCCGACCCGT |
| 40081 | ACTCATAACC GGCATCCCGC AGTTCGTCAT AGAACCCCGA GACGTCGACG GCCGCGGCCG |
| 40141 | TGGCCGGCGG CCACTGCGAG AACGGCTCAC CGGAAGCGTT GGAGGTATCC GGGGTGTCGG |
| 40201 | GGGTCAGGGT GCCGCTGGCG TGCCGGGTCC AGCTGCCCGT GCCCTCGGTA CGCGCGTGGA |
| 40261 | CGGTCACCGG CCGCCGTCCG GCCTCATCGG CCCCTTCCAC GGTCACCGAC ACATCCACCG |
| 40321 | CTGCGGTCAC CGGCACCACG AGCGGGGATT CGATGACCAG TTCATCCACC ACCCCGCAAC |
| 40381 | CGGTCTCGTC ACCGGCCCGG ATGACCAGCT CCACAAACGC CGTACCCGGC AGCAGAACCG |
| 40441 | TGCCCCGCAC CGCGTGATCA GCCAGCCAGG GATGCGTACG CAATGAGATC CGGCCGGTGA |
| 40501 | GAACAACACC ACCACCGTCG TCGGCGGGCA GTGCTGTGAC GGCGGCCAGC ATCGGATGCG |
| 40561 | CCGCCCCGGT CAGCCCGGCC GCGGACAGGT CGGTGGCACC GGCCGCCTCC AGCCAGTACC |
| 40621 | GCCTGTGCTC GAACGCGTAG GTGGGCAGAT CCAGCAGCCG CCCCGGCACC GGTTCGACCA |
| 40681 | CCGTGCCCCA GTCCACCCCC GCACCCAGAG TCCACGCCTG CGCCAACGCC CCCAGCCACC |
| 40741 | GCTCCCAGCC ACCGTCACCA GTCCGCAACG ACGCCACCGT GCGGGCCTGT TCCATCGCCG |
| 40801 | GCAGCAGCAC CGGATGGGCA CTGCACTCCA CGAACACCGA CCCGTCCAGC TCCGCCACCG |
| 40861 | COGOATOCAG CGCGACAGGG CGACGCAGGT TCCGGTACCA GTACCCCTCA TCCACCGGCT |
| 40921 | CGGTCACCCA GGCGCTGTCC ACGGTCGACC ACCACGCCAC CGACCCGGTC CCGCCGGAAA |
| 40981 | TTCCCTTCAG TACCTCAGCG AGTTCGTCCT CGATGGCCTC CACGTGAGGC GTGTGGGAGG |
| 41041 | CGTAGTCGAC CGCGATACGA CGCACCCGCA CCCCATCAGC CTCATACCGC GCCACCACCT |
| 41101 | CCTCCACCGC CGACGGGTCC CCCGCCACCA CCGTCGAAGC CGGACCATTA CGCGCCGCGA |
| 41161 | TCCACACACC CTCGACCAGA CCCACCTCAC CGGCCGGCAA CGCCACCGAA GCCATCGCCC |
| 41221 | CCCGGCCGGC CAGCCGCGCC GCGATCACCC GACTGCGCAA CGCCACCACG CGGGCGGCGT |
| 41281 | CCTCCAGGCT GAGGGCTCCG GCCACACACG CCGCCGCGAT CTCCCCCTGC GAGTGTCCGA |
| 41341 | CCACAGCGTC CGGCACGACC CCATGCGCCT GCCACAGCGC GGCCAGGCTC ACCGCGACCG |
| 41401 | CCCAGCTGGC CGGCTGGACC ACCTCCACCC GCTCCGCCAC ATCCGACCGC GACAACATCT |
| 41461 | CCCGCACATC CCAGCCCGTG TGCGGCAACA ACGCCCGCGC ACACTCCTCC ATACGAGCCG |
| 41521 | CGAACACCGC GGAACGGTCC ATGAGTTCCA CGCCCATGCC CACCCACTGG GCACCCTGCC |
| 41581 | CGGGGAAGAC GAACACCGTA CGCGGCTGAT CCACCGCCAC ACCCATCACC CGGGCATCAC |
| 41641 | CCAGCAGCAC CGCACGGTGA CCGAAGACAG CACGCTCACG CACCAACCCC TGCGCGACCG |
| 41701 | CGGCCACATC CACCCCACCC CCGCGCAGAT ACCCCTCCAG CCGCTCCACC TGCCCCCGCA |
| 41761 | GACTCACCTC ACCACGAGCC GACACCGGCA ACGGCACCAA CCCATCACCA CCCGACTCCA |
| 41821 | CACGCGACGG CCCAGGAACA CCCTCCAGGA TCACGTGCGC GTTCGTACCG CTCACCCCGA |
| 41881 | ACGACGACAC ACCCGCATGC GGTGCCCGAT CCGACTCGGG CCACGGCCTC GCCTCGGTGA |
| 41941 | GCAGCTCCAC CGCACCGGCC GACCAGTCCA CATGCGACGA CGGCTCGTCC ACGTGCAGCG |
| 42001 | TCTTCGGCGC GATCCCATGC CGCATCGCCA TGACCATCTT GATGACACCG GCGACACCCG |
| 42061 | CAGCCGCCTG CGCATGACCG ATGTTCGACT TGACCGAACC GAGGTAGAGC GGCGTGTCGC |
| 42121 | GGTCCTGCCC GTAGGCCGCG AGGACGGCCT GCGCCTCGAT CGGGTCGCCC AGCCGCGTGC |
| 42181 | CGGTGCCGTG CGCCTCCACC ACGTCCACAT CGGCGGCGCG CAGTCCGGCG TTGACCAACG |
| 42241 | CCTGCCGGAT CACGCGCTGC TGGGCGACGC CGTTGGGGGC GGACAGTCCG TTGGAGGCAC |
| 42301 | CGTCCTGGTT CACCGCCGAG CCGCGGACGA CCGCGAGAAC GGTGTGCCCG TTGCGCTCGG |
| 42361 | CGTCGGAGAG CCGCTCCAGC ACGAGAACGC CGACGCCCTC GGCGAAGCCG GTCCCGTCCG |
| 42421 | CCGCGTCGGC GAACGCCTTG CACCGTCCGT CCGGGGAGAG TCCGCGCTGC CGGGAGAACT |
| 42481 | CCACGAGCTC TGCGGTGTTC GCCATGACGG TGACACCGCC GACCAGCGCC AGGGAGCACT |
| 42541 | CCCCGGCCCG CAGTGCCTGT GCCGCCTGGT GCAGGGCGAC CAGCGACGAC GAGCACGCCG |
| 42601 | TGTCGACCGT GACCGCCGGG CCCTGAAGTC CGTACACGTA CGAGAGGCGC CCGGACAGGA |
| 42661 | CGCTCGTCTG CGTCGCCGTG ACACCGAGCC CGCCCAGGTC CCGGCCGACG CCGTAGCCCT |
| 42721 | GGTTGAACGC GCCCATGAAC ACGCCGGTGT CGCTCTCCCG GAGCCTGTCC GGCACGATGC |
| 42781 | CGGCGTTCTC GAACGCCTCC CAGGAGGTCT CCAGGATCAG GCGCTGCTGG GGGTCCATCG |
| 42841 | CCAGCGCCTC GTTCGGACTG ATGCCGAAGA ACGCGGCGTC GAACCCGGCG CCGGCCAGGA |
| 42901 | ATCCGCCGTG GCGTGTCGTG GAGCGGCCGG CCGCGTCCGG GTCCGGGTCG TACAGCGCGT |
| 42961 | CGACGTCCCA GCCCCGGTCG GTGGGGAACT CGGTGATCGC CTCGGTACCG GCGGCGACGA |
| 43021 | GCCGCCACAG GTCCTCCGGC GAGGCGACCC CGCCGGGCAG TCGGCACGCC ATGCCGACGA |
| 43081 | TCGCGACGGG GTCGCCGGAG CCGAGGGTCT GGGCGGTCGC GGGTGCCGCT GTCGCGGAGC |
| 43141 | CGGCGAGGTG GGCGGCGAAC GCACGGGGAG TGGGGTGGTC GAACGCGGTT GACGCGGGCA |
| 43201 | CCCGCAGACC CGTCCGCGCG GCGACGGTGT TGGTGAACTC GACGGTGGTG AGCGAGTCGA |
| 43261 | GGCCGTTCTC GCGGAACGTG CGGTCCGGGG AGCAGTGTCC GGCGCCCGGC AGGCCCAGGA |
| 43321 | CGGTGGCGAC GCTGTCGCGG ACCAGGTCGA GCAGTACGTC CTCCCGGCCC GCACGGGCCG |
| 43381 | CGGCGAGGCG GTTCGCCCAC TCCTGTTCCG TGGCGTCGGG CTCGGCCGGT CCGGTCAGTG |
| 43441 | CGGTGAGGAT CGGCGGCGTG GCGCCCGCCA TCGTCGCGGC CCGCGCCCCG GCGGAACCGG |
| 43501 | TCCGGGCCAC GATGTACGAG CCGCCGCCCG CGATGGCCTT CTCGATCAGG TCGCCGGTGA |
| 43561 | GCGCCGGCCG TTCGATGCCG GGCAGCGCGC GGACGGTGAC GGTGGGGAGT CCCTCCGCGG |
| 43621 | CCCGTGGCCG GGTGTGGGCG TCGGCGCCGG CCGGGCCGTC GAGCAGGACG TGCACGAGCG |
| 43681 | CGCCGGGGTT CGCGGCTTCC TCGGCTGCGG TGGTCACGTG GGTGAGGCCG GTCTCGTCGC |
| 43741 | GGAGCAGGCC GGCGACGGTG TCGGCGTCCT CCCCGGTGAC CAGGACCGGC GCGTCCGGGC |
| 43801 | CGATCGGAGG CGGCACGGTG AGGACCATCT TGCCGGTGTG CCGGGCGTGG CTCATCCACG |
| 43861 | CGAACGCGTC CCGCGCACGG CGGATGTCCC ACGGCTGCAC CGGCAGCGGG CACAGCTCAC |
| 43921 | CGCGGTCGAA CAGGTCGAGG AGCAGTTCGA GGATCTCCCG CAGGCGCGCG GGATCCACGT |
| 43981 | CGGCCAGGTC GAACGGCTGC TGGGCGGCGT GGCGGATGTC GGTCTTGCCC ATCTCGACGA |
| 44041 | ACCGGCCGCC CGGTGCGAGC AGGCCGATGG ACGCGTCGAG GAGTTCACCG GTGAGCGAGT |
| 44101 | TGAGCACGAC GTCGACCGGC GGGAAGGTGT CGGCGAACGC GGCGCTGCGG GAGTTCGCCA |
| 44161 | CATGGTCGGT GTCGAAGCCG TCGGCGTGCA GCAGGTGTTG TTTGGCGGGA CTGGCGGTGG |
| 44221 | CGTACACCTC GGCGCCGAGG TGGCGGGCGA TCCGGGTCGC CGCCATGCCG ACACCGCCCG |
| 44281 | TCGCGGCGTG GACCAGGACC TTCTGGCCGG GTCGCAGCTC GCCCGCGTCG ACGAGGCCGT |
| 44341 | ACCAGGCGGT GGCGAACACG ATGGGCACGG ACGCGGCGAT GGGGAACGAC CATCCCCGTG |
| 44401 | GGATCCGTGC GACCAGCCGC CGGTCCGCGA CCACGCTGCG CCGGAACGCG TCCTGCACGA |
| 44461 | GACCGAACAC GCGGTCGCCG GGGGCCAGGT CGTCGACGCC GGGTCCGACT TCGGTCACGA |
| 44521 | TGCCCGCGGC CTCCCCGCCC ATCTCGCCCT CGCCCGGGTA GGTGCCGAGC GCGATCAGCA |
| 44581 | CGTCGCGGAA GTTCAGCCCC GCGGCGCGGA CGTCGATGCG GACCTCGCCG GCGGCCAGGG |
| 44641 | GCGCGGCGGG ACGTCGAGCG GGGCGACGAC GAGGTCGCGG AGCGTTCCGG AGGCGGGCGG |
| 44701 | GCGCAGCGCC CACTGGCGCG GTCGGCAGGG GGGTGGTGTC CGCGCGTACC AGCCGGGGCA |
| 44761 | CGTAGGCCAC GCCGGCCCGC AGCGCGATCT GGGGTTCGCC GAGCGAGGCC GCGGCGGGGA |
| 44821 | CGAGGTCGTC ATCGCCGTCC GTGTCCACCA GCACGAACGA TCCGGGTTCG GCGGCCTGGC |
| 44881 | GGCGCAGCGC CTCGTCCCAG AGCCGGGCCT GGTCCGCGTC CGGGATCTCG GCCGGGCCGA |
| 44941 | CGCCCACCGC GCGGCGGGTG ACGACCGTCC GGCGGGGTGA CGGGGTGCCG GGCAGGTCGC |
| 45001 | GCCGCTCCCA GACCAGTTCG CACAGCGTGG CCTCGCCACT GCCGGTGGCG ACCAGATGGG |
| 45061 | CCGGCAGCCC CGCGAGCCGC GCGCGCTGGA CCTTGCCCGA CGCGGTGCGG GGGATCGTGG |
| 45121 | TGACGTGCCA GATCTCGTCG GGCACCTTGA AGTAGGCGAG CCGGCGGCGG CACTCGGCGA |
| 45181 | GGATCGCCTC GGCGGGGACG CGGGGGCCGT CGGAAACGAC GTAGAGCACG GGTATGTCGC |
| 45241 | CGAGGACGGG GTGCGGGCGG CCCGCCGCGG CGGCGTCCCG GACACCGGCC ACCTCCTGGG |
| 45301 | CGACGGTCTC GATCTCCCGG GGGTGGATGT TCTCCCCGCC GCGGATGATC AGCTCCTTGA |
| 45361 | CCCGGCCGGT GATCGTCACG TGTCCGGTCT CGGCCTGACG TGCGAGGTCC CCGGTGCGGT |
| 45421 | ACCAGCCGTC CACGAGCACC TGGGGGGTCG CCTCCGGCTG GGCGTGGTAG CCGAGCATGA |
| 45481 | GGCTCGGCCC GCTCGCCCAC AGCTCGCCCT CCTCGCCGGG TGCCACGTCG GCGCCGGACA |
| 45541 | CCGGGTCGAC GAACCGCAGC GACAGGCCCG GCACGGGCAG CCCGCACGAG CCGGGAACCC |
| 45601 | GCGCATCCTC CAGGGTGTTG GCGGTGAGCG AGCCGGTCGT CTCGGTGCAG CCGTACGTGT |
| 45661 | CGAGCAGGGG CACGCCGAAC GTCGCCTCGA AATCCCTGGT GAGCGACGCC GGCGAGGTGG |
| 45721 | ATCCGGCGAC CAGCGCCACG CGCAGCGCGC GAGCCCGCGG CTCGCCGGAC ACGGCGCCGA |
| 45781 | GGAGGTAGCG GTACATCGTC GGCACGCCGA CGAGCACGGT GCTGGAGTGT TCGGCCAGGG |
| 45841 | CGTCGAGGAC GTCACGCGCG ACGAAGCCGC CCAGGATACG GGCGGACGCG CCGACCGTGA |
| 45901 | GGACGGCGAG CAGGCAGAGG TGGTGGCCGA GGCTGTGGAA CAGCGGGGCG GGCCAGAGCA |
| 45961 | GTTCGTCGTC CTCGGTCAGC CGCCAGGACG GCACGTCGCA GTGCATCGCG GACCACAGGC |
| 46021 | CGCTGCGCTG TGCGGAAACC ACGCCCTTGG GACGGCCGGT GGTGCCGGAG GTGTAGAGCA |
| 46081 | TCCAGGCGGG TTCGTCCAGG CCGAGGTCGT CGCGGGGCGG GCACGGCGGC TCGGTCCCGG |
| 46141 | CGAGGTCCTC GTAGGAGACG CAGTCCGGTG CCCGGCGCCC GACGAGCACG ACGGTGGCGT |
| 46201 | CGGTGCCGGT GCGGCGCACC TGGTCGAGGT GGGTTTCGTC GGTGACCAGC ACGGTCGCGC |
| 46261 | CGGAGTCCGT CAGGAAGTGG GCGAGTTCGG CGTCGGCGGC GTCCGGGTTG AGCGGGACGG |
| 46321 | CGACGGCGGC GGCGCGGGCG GCGGCGAGGT AGACCTCGAT GGTCTCGATC CGGTTGCCGA |
| 46381 | GCAGCATCGC GACCCGGTCG CCGCGGTCGA CGCCGGACGC GGCGAGGTGT CCGGCGAGCC |
| 46441 | GGCCGGCCCG GAGCCGGAGT TGCGTGTACG TCACGGCGCG TTGGGAATCC GTGTAGGCGA |
| 46501 | TCCGGTCGCC GCGTCGCTCG GCATGGATGC GGAGCAATTC GTGCAACGGC CGGATTGGTT |
| 46561 | CCACACGCGC CATGGAAACA CCTTTCTCTC GACCAACCGC ACAACAGCAC GGAACCGGCC |
| 46621 | ACGAGTAGAC GCCGGCGACG CTAGCAGCGT TTTCCGGACC GCCACCCCCT GAAGATCCCC |
| 46681 | CTACCGTGGC CGGCCTCCCC GGACGCTCAT CTAGGGGGTT GCACGCATAC CGCCGTGCGT |
| 46741 | AATTGCCTTC CTGATGACCG ATGCCGGACG CCAGGGAAGG GTGGAGGCGT TGTCCATATC |
| 46801 | TGTCACGGCG CCGTATTGCC GCTTCGAGAA GACCGGATCA CCGGACCTCG AGGGTGACGA |
| 46861 | GACGGTGCTC GGCCTGATCG AGCACGGCAC CGGCCACACC GACGTGTCGC TGGTGGACGG |
| 46921 | TGCTCCCCGG ACCGCCGTGC ACACCACGAC CCGTGACGAC GAGGCGTTCA CCGAGGTCTG |
| 46981 | GCACGCACAG CGCCCTGTCG AGTCCGGCAT GGACAACGGC ATCGCCTGGG GCCGCACCGA |
| 47041 | CGCGTACCTG TTCGGTGTCG TGCGCACCGG CGAGAGCGGC AGGTACGCCG ATGCCACCGC |
| 47101 | GGCCCTCTAC ACGAACGTCT TCCAGCTCAC CCGGTCGCTG GGGTATCCCC TGCTCGCCCG |
| 47161 | GACCTGGAAC TACGTCAGCG GTATCAACAC GACGAACGCG GACGGGCTGG AGGTGTACCG |
| 47221 | GGACTTCTGC GTGGGCCGCG CCCAGGCGCT CGACGAGGGC GGGATCGACC CGGCCACCAT |
| 47281 | GCCCGCGGCC ACCGGTATCG GCGCCCACGG GGGCGGCATC ACCTGCGTGT TCCTCGCCGC |
| 47341 | CCGGGGCGGA GTGCGGATCA ACATCGAGAA CCCCGCCGTC CTCACGGCCC ACCACTACCC |
| 47401 | GACGACGTAC GGTCCGCGGC CCCCGGTCTT CGCACGGGCC ACCTGGCTGG GCCCGCCGGA |
| 47461 | GGGGGGCCGG CTGTTCATCT CCGCGACGGC CGGCATCCTC GGACACCGAA CGGTGCACCA |
| 47521 | CGGTGATGTG ACCGGCCAGT GCGAGGTCGC CCTCGACAAC ATGGCCCGGG TCATCGGCGC |
| 47581 | GGAGAACCTG CGGCGCCACG GCGTCCAGCG GGGGCACGTC CTCGCCGACG TGGACCACCT |
| 47641 | CAAGGTCTAC GTCCGCCGCC GCGAGGATCT CGATACGGTC CGCCGGGTCT GCGCCGCACG |
| 47701 | CCTGTCGAGC ACCGCGGCCG TCGCCCTTTT GCACACCGAC ATAGCCCGCG AGGATCTGCT |
| 47761 | CGTCGAAATC GAAGGCATGG TGGCGTGACA ATACCCGGTA AAAGGCCCGC GACGCTGCGC |
| 47821 | CTCGGCGGAT CCGCGAAGAG AAAGAAGAGC GTCACCGCAC AGCGCGGCAG CCCGGTCCTT |
| 47881 | TCGTCCTTCG CACAGCGGCG GATCTGGTTT CTCCAGCAAT TGGACCCGGA GAGCAACGCC |
| 47941 | TATAATCTCC CGCTCGTGCA ACGCCTGCGC GGTCTATTGG ACGCGCCGGC CCTGGAGCGT |
| 48001 | GCGCTGGCGC TCGTCGTCGC GCGCCACGAG GCGTTGCGGA CGGTGTTCGA CACCGCCGAC |
| 48061 | GGCGAGCCCC TCCAGCGGGT GCTTCCCGCC CCGGAACACC TCCTGCGCCA CGCGCGGGCG |
| 48121 | GGCAGCGAGG AGGACGCCGC CCGGCTCGTC CGCGACGAGA TCGCCGCGCC GTTCGACCTC |
| 48181 | GCCACCGGGC CGTTGATCAG GGCCCTGCTG ATCCGCCTCG GTGACGACGA CCACGTTCTC |
| 48241 | GCGGTGACCG TGCACCATGT CGCCGGCGAC GGCTGGTCGT TCGGGCTCCT CCAACATGAA |
| 48301 | CTCGCAGCCC ACTACACGGC GCTGCGCGAC ACTGCCCGCC CTGCCGAACT GCCGCCGTTG |
| 48361 | CCGGTGCAGT ACGCCGACTT CGCCGCCTGG GAGCGGCGCG AACTCACCGG CGCCGGACTG |
| 48421 | GACAGGCGTC TGGCCTACTG GCGCGAGCAA CTCCGGGGCG CCCCGGCGCG GCTCGCCCTC |
| 48481 | CCCACCGACC GTCCCCGCCC GCCGGTCGCC GACGCGGACG CGGGCATGGC CGAGTGGCGG |
| 48541 | CCGCCGGCCG CGCTGGCCAC CGCGGTCCTC ACGCTCGCGC GCGACTCCGG TGCGTCCGTG |
| 48601 | TTCATGACCC TGCTGGCGGC CTTCCAAGCG GTCCTCGCCC GGCAGGCGGG CACGCGGGAC |
| 48661 | GTGCTGGTCG GCACGCCCGT GGCGAACCGT ACGCGGGCGG CGTACGAGGG CCTGATCGGC |
| 48721 | ATGTTCGTCA ACACGCTCGC GCTGCGCGGC GACCTCTCGG GCGATCCGTC GTTCCGGGAA |
| 48781 | CTCCTCGACC GdTGCCGGGC CACGACCACG GACGCGTTCG CCCACGCCGA CCTGCCGTTC |
| 48841 | GAGAACGTCA TCGAACTCGT CGCACCGGAA CGCGACCTGT CGGTCAACCC GGTCGTCCAG |
| 48901 | GTGCTGTTGC AGGTGCTGCG GCGCGACGCG GCGACGGCCG CGCTGCCCGG CATCGCGGCC |
| 48961 | GAACCGTTCC GCACCGGACG CTGGTTCACC CGCTTCGACC TCGAATTCCA TGTGTACGAG |
| 49021 | GAGCCGGGTG GCGCGCTGAC CGGCGAACTG CTCTACAGCC GTGCGCTGTT CGACGAGCCA |
| 49081 | CGGATCACGG GGTTGCTGGA GGAGTTCACG GCGGTGCTTC AGGCGGTCAC CGCCGACCCG |
| 49141 | GACGTACGGC TGTCGCGGCT GCCGGCCGGC GACGCGACGG CGGCAGCGCC CGTGGTGCCC |
| 49201 | TCGAACGACA CGGCGCGGGA CCTGCCCGTC GACACGCTGC CGGGCCTGCT GGCCCGGTAC |
| 49261 | GCCGCACGCA CCCCCGGCGC CGTGGCCGTC ACCGACCCGC ACATOTOOCT CACCTACGCG |
| 49321 | CAGCTGGACC GGCGGGCGAA CCGCCTCGCG CACCTGCTCC GCGCGCGCGG CACCGCCACC |
| 49381 | GGCGACCTGG TCGGGATCTG CGCCGATCGC GGCGCCGACC TGATCGTCGG CATCGTGGGG |
| 49441 | ATCCTCAAGG CGGGCGCCGC TTATGTGCCG CTGGACCCCG AACATCCTCC GGAGCGCACG |
| 49501 | GCGTTCGTGC TGGCCGACGC GCAGCTGACC ACGGTGGTGG CGCACGAGGT CTACCGTTCC |
| 49561 | CGGTTCCCCG ATGTGCCGCA CGTGGTGGCG TTGGACGACC CGGAGCTGGA CCGGCAGCCG |
| 49621 | GACGACACGG CGCCGGACGT CGAGCTGGAC CGGGACAGCC TCGCCTACGC GATCTACACG |
| 49681 | TCCGGGTCGA CCGGCAGGCC GAAGGCCGTG CTCATGCCGG GTGTCAGCGC CGTCAACCTG |
| 49741 | CTGCTCTGGC AGGAGCGCAC GATGGGCCGC GAGCCGGCCA GCCGCACCGT CCAGTTCGTG |
| 49801 | ACGCCCACGT TCGACTACTC GGTGCAGGAG ATCTTTTCCG CGCTGCTGGG CGGCACGCTC |
| 49861 | GTCATCCCGC CGGACGAGGT GCGGTTCGAC CCGCCGGGAC TCGCCCGGTG GATGGACGAA |
| 49921 | CAGGCGATTA CCCGGATCTA CGCGCCGACG GCCGTACTGC GCGCGCTGAT CGAGCACGTC |
| 49981 | GATCCGCACA GCGACCAGCT CGCCGCCCTG CGGCACCTGT GCCAGGGCGG CGAGGCGCTG |
| 50041 | ATCCTCGACG CGCGGTTGCG CGAGCTGTGC CGGCACCGGC CCCACCTGCG CGTGCACAAT |
| 50101 | CACTACGGTC CGGCCGAAAG CCAGCTCATC ACCGGGTACA CGCTGCCCGC CGACCCCGAC |
| 50161 | GCGTGGCCCG CCACCGCACC GATCGGCCCG CCGATCGACA ACACCCGCAT CCATCTGCTC |
| 50221 | GACGAGGCGA TGCGGCCGGT TCCGGACGGT ATGCCGGGGC AGCTCTGCGT CGCCGGCGTC |
| 50281 | GGCCTCGCCC GTGGGTACCT GGCCCGTCCC GAGCTGACCG CCGAGCGCTG GGTGCCGGGA |
| 50341 | GATGCGGTCG GCGAGGAGCG CATGTACCTC ACCGGCGACC TGGCCCGCCG CGCGCCCGAC |
| 50401 | GGCGACCTGG AATTCCTCGG CCGGATCGAC GACCAGGTCA AGATCCGCGG CATCCGCGTC |
| 50461 | GAACCGGGTG AGATCGAGAG CCTGCTCGCC GAGGACGCCC GCGTCACGCA GGCGGCGGTG |
| 50521 | TCCGTGCGCG AGGACCGGCG GGGCGAGAAG TTCCTGGCCG CGTACGTCGT ACCGGTGGCC |
| 50581 | GGCCGGCACG GCGACGACTT CGCCGCGTCG CTGCGCGCGG GACTGGCCGC CCGGCTGCCC |
| 50641 | GCCGCGCTCG TGCCCTCCGC CGTCGTCCTG GTGGAGCGAC TGCCGAGGAC CACGAGCGGC |
| 50701 | AAGGTGGACC GGCGCGCGCT GCCCGACCCG GAGCCGGGCC CGGCGTCGAC CGGGGCGGTT |
| 50761 | ACGCCCCGCA CCGATGCCGA GCGGACGGTG TGCCGGATCT TCCAGGAGGT GCTCGACGTC |
| 50821 | CCGCGGGTCG GTGCCGACGA CGACTTCTTC ACGCTCGGCG GGCACTCCCT GCTCGCCACC |
| 50881 | CGGGTCGTCT CCCGCATCCG CGCCGAGCTG GGTGCCGATG TCCCGCTGCG TACGCTCTTC |
| 50941 | GACGGGCGGA CGCCCGCCGC GCTCGCCCGT GCGGCGGACG AGGCCGGCCC GGCCGCCCTG |
| 51001 | CCCCCGATCG CGCCCTCCGC GGAGAACGGG CCGGCCCCCC TCACCGCGGC ACAGGAACAG |
| 51061 | ATGCTGCACT CGCACGGCTC GCTGCTCGCC GCGCCCTCCT ACACGGTCGC CCCGTACGGG |
| 51121 | TTCCGGCTGC GCGGGCCACT CGACCGCGAA GCGCTCGACG CGGCACTGAC CCGGATCGCC |
| 51181 | GCGCGCCACG AGCCGCTGCG GACCGGGTTC CGCGATCGGG AACAGGTCGT CCGGCCGCCC |
| 51241 | GCTCCGGTGC GCGCCGAGGT GGTTCCGGTG CCGGTCGGCG ACGTCGACGC CGCGGTCCGG |
| 51301 | GTCGCCCACC GGGAGCTGAC CCGGCCGTTC GACCTCGTGA ACGGGTCGTT GCTGCGTGCC |
| 51361 | GTGCTGCTGC CGCTGGGCGC CGAGGATCAC GTGCTGCTGC TGATGCTGCA CCACCTCGCC |
| 51421 | GGTGACGGAT GGTCCTTCGA CCTCCTGGTC CGGGAGTTGT CGGGGACGCA ACCGGACCTT |
| 51481 | CCGGTGTCCT ACACGGACGT GGCCCGGTGG GAACGGAGTC CGGCCGTGAT CGCGGCCAGG |
| 51541 | GAGAACGACC GGGCCTACTG GCGCCGGCGG CTGGGGGGCG CCACCGCGCC GGAGCTGCCC |
| 51601 | GCGGTCCGGC CCGGCGGGGC ACCGACCGGG CGGGCGTTCC TGTGGACGCT CAAGGACACC |
| 51661 | GCCGTCCTGG CGGCACGCCG GGTCGCGGAC GCCCACGACG CGACGTTGCA CGAAACCGTG |
| 51721 | CTCGGCGCCT TCGCCCTGGT CGTGGCGGAG ACCGCCGACA CCGACGACGT GCTCGTCGCG |
| 51781 | ACGCCGTTCG CGGACCGGGG GTACGCCGGG ACCGACCACC TCATCGGCTT CTTCGCGAAG |
| 51841 | GTCCTCGCGC TGCGCCTCGA CCTCGGCGGC ACGCCGTCGT TCCCCGAGGT GCTGCGCCGG |
| 51901 | GTGCACACCG CGATGGTGGG CGCGCACGCC CACCAGGCGG TGCCCTACTC CGCGCTGCGC |
| 51961 | GCCGAGGACC CCGCGCTGCC GCCGGCCCCC GTGTCGTTCC AGCTCATCAG CGCGCTCAGC |
| 52021 | GCGGAACTGC GGCTGCCCGG CATGCACACC GAGCCGTTCC CCGTCGTCGC CGAGACCGTC |
| 52081 | GACGAGATGA CCGGCGAACT GTCGATCAAC CTCTTCGACG ACGGTCGCAC CGTCTCCGGC |
| 52141 | GCGGTGGTCC ACGATGCCGC GCTGCTCGAC CGTGCCACCG TCGACGATTT GCTCACCCGG |
| 52201 | GTGGAGGCGA CGCTGCGTGC CGCCGCGGGC GACCTCACCG TACGCGTCAC CGGTTACGTG |
| 52261 | GAAAGCGAGT AGCCATGCCC GAGCAGGACA AGACAGTCGA GTACCTTCGC TGGGCGACCG |
| 52321 | CGGAACTCCA GAAGACCCGT GCGGAACTCG CCGCGCACAG CGAGCCGTTG GCGATCGTGG |
| 52381 | GGATGGCCTG CCGGCTGCCC GGCGGGGTCG CGTCGCCGGA GGACCTGTGG CAGTTGCTGG |
| 52441 | AGTCCGGTGG CGACGGCATC ACCGCGTTCC CCACGGACCG GGGCTGGGAG ACCACCGCCG |
| 52501 | ACGGTCGCGG CGGCTTCCTC ACCGGGGCGG CCGGCTTCGA CGCGGCGTTC TTCGGCATCA |
| 52561 | GCCCGCGCGA GGCGCTGGCG ATGGACCCGC AGCAGCGCCT GGCCCTGGAG ACCTCGTGGG |
| 52621 | AGGCGTTCGA GCACGCGGGC ATCGATCCGC AGACGCTGCG GGGCAGTGAC ACGGGGGTGT |
| 52681 | TCCTCGGCGC GTTCTTCCAG GGGTACGGCA TCGGCGCCGA CTTCGACGGT TACGGCACCA |
| 52741 | CGAGCATTCA CACGAGCGTG CTCTCCGGCC GCCTCGCGTA CTTCTAGGGT CTGGAGGGTC |
| 52801 | CGGCGGTCAC GGTCGACACG GCGTGTTCGT CGTCGCTGGT GGCGCTGCAC CAGGCCGGGC |
| 52861 | AGTCGCTGCG CTCCGGCGAA TGCTCGCTCG CCCTGGTCGG CGGCGTCACG GTGATGGCCT |
| 52921 | CGCCGGCGGG GTTCGCGGAC TTCTCCGAGC AGGGCGGCCT GGCCCCCGAC GCGCGCTGCA |
| 52981 | AGGCCTTCGC GGAAGCGGCT GACGGCACCG GTTTCGCCGA GGGGTCCGGC GTCCTGATCG |
| 53041 | TCGAGAAGCT GTCCGACGCC GAGCGCAACG GCCACCGCGT GCTGGCGGTC GTCCGGGGTT |
| 53101 | CCGCCGTCAA CCAGGACGGT GCCTCCAACG GGCTGTCCGC GCCGAACGGG CCGTCGCAGG |
| 53161 | AGCGGGTGAT CCGGCAGGCC CTGGCCAACG CCGGACTCAC CCCGGCGGAC GTGGACGCCG |
| 53221 | TCGAGGCCCA CGGCACCGGC ACCAGGCTGG GCGACCCCAT CGAGGCACAG GCCGTGCTGG |
| 53281 | CCACCTACGG GCAGGGGCGC GACACCCCTG TGCTGCTGGG CTCGCTGAAG TCCAACATCG |
| 53341 | GCCACACCCA GGCCGCCGCG GGCGTCGCCG GTGTCATCAA GATGGTCCTC GCCATGCGGC |
| 53401 | ACGGCACCCT GCCCCGCACC CTGCACGTGG ACACGCCGTC CTCGCACGTC GACTGGACGG |
| 53461 | CCGGCGCCGT CGAACTCCTC ACCGACGCCC GGCCCTGGCC CGAAACCGAC CGCCCACGGC |
| 53521 | GCGCCGGTGT CTCCTCCTTC GGCGTCAGCG GCACCAACGC CCACATCATC CTCGAAAGCC |
| 53581 | ACCCCCGACC GGCCCCCGAA CCCGCCCCGG CACCCGACAC CGGACCGCTG CCGCTGCTGC |
| 53641 | TCTCGGCCCG CACCCCGCAG GCACTCGACG CACAGGTACA CCGCCTGCGC GCGTTCCTCG |
| 53701 | ACGACAACCC CGGCGCGGAC CGGGTCGCCG TCGCGCAGAC ACTCGCCCGG CGCACCCAGT |
| 53761 | TCGAGCACCG CGCCGTGCTG CTCGGCGACA CGCTCATCAC CGTGAGCCCG AACGCCGGCC |
| 53821 | GCGGACCGGT GGTCTTCGTC TACTCGGGGC AAAGCACGCT GCACCCGCAC ACCGGGCGGC |
| 53881 | AACTCGCGTC CACCTACCCC GTGTTCGCCG AAGCGTGGCG CGAGGCCCTC GACCACCTCG |
| 53941 | ACCCCACCCA GGGCCCGGCC ACGCACTTCG COCACCAGAC CGCGCTCACC GCGCTCCTGC |
| 54001 | GGTCCTGGGG CATCACCCCG CACGCGGTCA TCGGCCACTC CCTCGGTGAG ATCACCGCCG |
| 54061 | CGCACGCCGC CGGTGTCCTG TCCCTGAGGG ACGCGGGCGC GCTCCTCACC ACCCGCACCC |
| 54121 | GCCTGATGGA CCAACTGCCG TCGGGCGGCG CGATGGTCAC CGTCCTGACC AGCGAGGAAA |
| 54181 | AGGCACGCCA GGTGCTGCGG CCGGGCGTGG AGATCGCCGC CGTCAACGGC CCCCACTCCC |
| 54241 | TCGTGCTGTC CGGGGACGAG GAAGCCGTAC TCGAAGCCGC CCGGCAGCTC GGCATCCACC |
| 54301 | ACCGCCTGCC GACCCGCCAC GCCGGCCACT CCGAGCGCAT GCAGCCACTC GTCGCCCCCC |
| 54361 | TCCTCGACGT CGCCCGGACC CTGACGTACC ACCAGCCCCA CACCGCCATC CCCGGCGACC |
| 54421 | CCACCACCGC CGAATACTGG GCGCACCAGG TCCGCGACCA AGTACGTTTC CAGGCGCACA |
| 54481 | CCGAGCAGTA CCCGGGCGCG ACGTTCCTCG AGATCGGCCC CAACCAGGAC CTCTCGCCGC |
| 54541 | TCGTCGACGG CGTTGCCGCC CAGACCGGTA CGCCCGACGA GGTGCGGGCG CTGCACACCG |
| 54601 | CGCTCGCGCA GCTCCACGTC CGCGGCGTCG CGATCGACTG GACGCTCGTC CTCGGCGGGG |
| 54661 | ACCGCGCGCC CGTCACGCTG CCCACGTATC CGTTCCAGCA CAAGGACTAC TGGCTGCGGC |
| 54721 | CCACCTCCCG GGCCGATGTG ACCGGCGCGG GGCAGGAGCA GGTGGCGCAC CCGCTGCTCG |
| 54781 | GCGCCGCGGT CGCGCTGCCC GGCACGGGCG GAGTCGTCCT GACCGGCCGC CTGTCGCTGG |
| 54841 | CCTCCCATCC GTGGCTCGGC GAGCACGCGG TCGACGGCAC CGTGCTCCTG CCCGGCGCGG |
| 54901 | CCTTCCTCGA ACTCGCGGCG CGCGCCGGCG ACGAGGTCGG CTGCGACCTG CTGCACGAAC |
| 54961 | TCGTCATCGA GACGCCGCTC GTGCTGCCCG CGACCGGCGG TGTGGCGGTC TCCGTCGAGA |
| 55021 | TCGCCGAACC CGACGACACG GGGCGGCGGG CGGTCACCGT CCACGCGCGG GCCGACGGCT |
| 55081 | CGGGCCTGTG GACCCGACAC GCCGGCGGAT TCCTCGGCAC GGCACCGGCA CCGGCCACGG |
| 55141 | CCACGGACCC GGCACCCTGG CCGCCCGCGG AAGCCGGACC GGTCGACGTC GCCGACGTCT |
| 55201 | ACGACCGGTT CGAGGACATC GGGTACTCCT ACGGACCGGG CTTCCGGGGG CTGCGGGCCG |
| 55261 | CCTGGCGCGC CGGCGACACC GTGTACGCCG AGGTCGCGCT CCCCGACGAG CAGAGCGCCG |
| 55321 | ACGCCGCCCG TTTCACGCTG CACCCCGCGC TGCTCGACGC CGCGTTCCAG GCCGGCGCGC |
| 55381 | TGGCCGCGCT CGACGCACCC GGCGGGGCGG CCCGACTGCC GTTCTCGTTC CAGGACGTCC |
| 55441 | GCATCCACGC GGCCGGGGCG ACGCGGCTGC GGGTCACGGT CGGCCGCGAC GGCGAGCGCA |
| 55501 | GCACCGTCCG CATGACCGGC CCGGACGGGC AGCTGGTGGC CGTGGTCGGT GCCGTGCTGT |
| 55561 | CGCGCCCGTA CGCGGAAGGC TCCGGTGACG GCCTGCTGCG CCCGGTCTGG ACCGAGCTGC |
| 55621 | CGATGCCCGT CCCGTCCGCG GACGATCCGC GCGTGGAGGT CCTCGGCGCC GACCCGGGCG |
| 55681 | ACGGCGACGT TCCGGCGGCC ACCCGGGAGC TGACCGCCCG CGTCCTCGGC GCGCTCCAGC |
| 55741 | GCCACCTGTC CGCCGCCGAG GACACCACCT TGGTGGTACG GACCGGCACC GGCCCGGCCG |
| 55801 | CTGCCGCCGC CGCGGGTCTG GTCCGCTCGG CGCAGGCGGA GAACCCCGGC CGCGTCGTGC |
| 55861 | TCGTCGAGGC GTCCCCGGAC ACCTCGGTGG AGCTGCTCGC CGCGTGCGCC GCGCTGGACG |
| 55921 | AACCGCAGCT GGCCGTCCGG GACGGCGTGC TCTTCGCGCC GCGGCTGGTC CGGATGTCCG |
| 55981 | ACCCCGCGCA CGGCCCGCTG TCCCTGCCGG ACGGCGACTG GCTGCTCACC CGGTCCGCCT |
| 56041 | CCGGCACGTT GCACGACGTC GCGCTCATAG CCGACGACAC GCCCCGGCGG GCGCTCGAAG |
| 56101 | CCGGCGAGGT CCGCATCGAC GTCCGCGCGG CCGGACTGAA CTTCCGCGAT GTGCTGATCG |
| 56161 | CGCTCGGGAC GTACACCGGG GCCACGGCCA TGGGCGGCGA GGCCGCGGGC GTCGTGGTGG |
| 56221 | AGACCGGGCC CGGCGTGGAC GACCTGTCCC CCGGCGACCG GGTGTTCGGC CTGACCCGGG |
| 56281 | GCGGCATCGG CCCGACGGCC GTCACCGACC GGCGCTGGCT GGCCCGGATC CCCGACGGCT |
| 56341 | GGAGCTTCAC CACGGCGGCG TCCGTCCCGA TCGTGTTCGC GACCGCGTGG TACGGCCTGG |
| 56401 | TCGACCTCGG CACACTGCGC GCCGGCGAGA AGGTCCTCGT CCACGCGGCC ACCGGCGGTG |
| 56461 | TCGGCATGGC CGCCGCACAG ATCGCCCGCC ACCTGGGCGC CGAGCTCTAC GCCACCGCCA |
| 56521 | GTACCGGCAA GCAGCACGTC CTGCGCGCCG CCGGGCTGCC CGACACGCAC ATCGCCGACT |
| 56581 | CTCGGACGAC CGCGTTCCGG ACCGCTTTCC CGCGCATGGA CGTCGTCCTG AACGCGCTGA |
| 56641 | CCGGCGAGTT CATCGACGCG TCGCTCGACC TGCTGGACGC CGACGGCCGG TTCGTCGAGA |
| 56701 | TGGGCCGCAC CGAGCTGCGC GACCCGGCCG CGATCGTCCC CGCCTACCTG CCGTTCGACC |
| 56761 | TGCTGGACGC GGGCGCCGAC CGCATCGGCG AGATCCTGGG CGAACTGCTC CGGCTGTTCG |
| 56821 | ACGCGGGCGC GCTGGAGCCG CTGCCGGTCC GTGCCTGGGA CGTCCGGCAG GCACGCGACG |
| 56881 | CGCTCGGCTG GATGAGCCGC GCCCGCCACA TCGGCAAGAA CGTCCTGACG CTGCCCCGGC |
| 56941 | CGCTCGACCC GGAGGGCGCC GTCGTCCTCA CCGGCGGCTC CGGCACGCTC GCCGGCATCC |
| 57001 | TCGCCCGCCA CCTGCGCGAA CGGCATGTCT ACCTGCTGTC CCGGACGGCA CCGCCCGAGG |
| 57061 | GGACGCCCGG CGTCCACCTG CGCTGCGACG TCGGTGACCG GGACCAGCTG GCGGCGGCCC |
| 57121 | TGGAGCGGGT GGACCGGCCG ATCACCGCCG TGGTGCACCT CGCCGGTGCG CTGGACGACG |
| 57181 | GCACCGTCGC GTCGCTCACC CCCGAGCGTT TCGACACGGT GCTGCGCCCG AAGGCCGACG |
| 57241 | GCGCCTGGTA CCTGCACGAG CTGACGAAGG AGCAGGACCT CGCCGCGTTC GTGCTCTACT |
| 57301 | CGTCGGCCGC CGGCGTGCTC GGCAACGCCG GCCAGGGCAA CTACGTCGCC GCGAACGCGT |
| 57361 | TCCTCGACGC GCTCGCCGAG CTGCGCCACG GTTCCGGGCT GCCGGCCCTC TCCATCGCCT |
| 57421 | GGGGGCTCTG GGAGGACGTG AGCGGGGTCA CCGCGGCGCT CGGCGAAGCC GACCGGGACC |
| 57481 | GGATGCGGCG CAGCGGTTTC CGGGCCATCA CCGCGCAACA GGGCATGCAC CTGTACGAGG |
| 57541 | CGGCCGGCCG CACCGGAAGT CCCGTGGTGG TCGCGGCGGC GCTCGACGAC GCGCCGGACG |
| 57601 | TGCCGCTGCT GCGCGGCCTG CGGCGGACGA CCGTCCGGCG GGCCGCCGTC CGGGAGTGTT |
| 57661 | CGTCCGCCGA CCGGCTCGCC GCGCTGACCG GCGACGAGCT CGCCGAAGCG CTGCTGACGC |
| 57721 | TCGTCCGGGA GAGCACCGCC GCCGTGCTCG GCCACGTGGG TGGCGAGGAC ATCCCCGCGA |
| 57781 | CGGCGGCGTT CAAGGACCTC GGCATCGACT CGCTCACCGC GGTCCAGCTG CGCAACGCCC |
| 57841 | TCACCGAGGC GACCGGTGTG CGGCTGAACG CCACGGCGGT CTTCGACTTC CCGACCCCGC |
| 57901 | ACGTGCTCGC CGGGAAGCTC GGCGACGAAC TGACCGGCAC CGGCGCGCCC GTCGTGCCCC |
| 57961 | GGACCGCGGC CACGGCCGGT GCGCACGACG AGCCGCTGGC GATCGTGGGA ATGGCCTGCC |
| 58021 | GGCTGCCCGG CGGGGTCGCG TCACCCGAGG AGCTGTGGCA CCTCGTGGCA TCCGGCACCG |
| 58081 | ACGCCATCAC GGAGTTCCCG ACGGACCGCG GCTGGGACGT CGACGCGATC TACGACCCGG |
| 58141 | ACCCCGACGC GATCGGCAAG ACCTTCGTCC GGCACGGTGG CTTCCTCACC GGCGCGACAG |
| 58201 | GCTTCGACGC GGCGTTCTTC GGCATCAGCC CGCGCGAGGC CCTCGCGATG GACCCGCAGC |
| 58261 | AGCGGGTGCT CCTGGAGACG TCGTGGGAGG CGTTCGAAAG CGCCGGCATC ACCCCGGACT |
| 58321 | CGACCCGCGG CAGCGACACC GGCGTGTTCG TCGGCGCCTT CTCCTACGGT TACGGCACCG |
| 58381 | GTGCGGACAC CGACGGCTTC GGCGCGACCG GCTCGCAGAC CAGTGTGCTC TCCGGCCGGC |
| 58441 | TGTCGTACTT CTACGGTCTG GAGGGTCCGG CGGTCACGGT CGACACGGCG TGTTCGTCGT |
| 58501 | CGCTGGTGGC GCTGCACCAG GCCGGGCAGT CGCTGCGCTC CGGCGAATGC TCGCTCGCCC |
| 58561 | TGGTCGGCGG CGTCACGGTG ATGGCGTCTC CCGGCGGCTT CGTGGAGTTC TCCCGGCAGC |
| 58621 | GCGGCCTCGC GCCGGACGGC CGGGCGAAGG CGTTCGGCGC GGGTGCGGAC GGCACGAGCT |
| 58681 | TCGCCGAGGG TGCCGGTGTG CTGATCGTCG AGAGGCTCTC CGACGCCGAA CGCAACGGTC |
| 58741 | ACACCGTCCT GGCGGTCGTC CGTGGTTCGG CGGTCAACCA GGATGGTGCC TCCAACGGGC |
| 58801 | TGTCGGCGCC GAACGGGCCG TCGCAGGAGC GGGTGATCCG GCAGGCCCTG GCCAACGCCG |
| 58861 | GGCTCACCCC GGCGGACGTG GACGCCGTCG AGGCCCACGG CACCGGCACC AGGCTGGGCG |
| 58921 | ACCCCATCGA GGCACAGGCG GTACTGGCCA CCTACGGACA GGAGCGCGCC ACCCCCCTGC |
| 58981 | TGCTGGGCTC GCTGAAGTCC AACATCGGCC ACGCCCAGGC CGCGTCCGGC GTCGCCGGCA |
| 59041 | TCATCAAGAT GGTGCAGGCC CTCCGGCACG GGGAGCTGCC GCCGACGCTG CACGCCGACG |
| 59101 | AGCCGTCGCC GCACGTCGAC TGGACGGCCG GCGCCGTCGA ACTGCTGACG TCGGCCCGGC |
| 59161 | CGTGGCCCGA GACCGACCGG CCACGGCGTG CCGCCGTCTC CTCGTTCGGG GTGAGCGGCA |
| 59221 | CCAACGCCCA CGTCATCCTG GAGGCCGGAC CGGTAACGGA GACGCCCGCG GCATCGCCTT |
| 59281 | CCGGTGACCT TCCCCTGCTG GTGTCGGCAC GCTCACCGGA AGCGCTCGAC GAGCAGATCC |
| 59341 | GCCGACTGCG CGCCTACCTG GACACCACCC CGGACGTCGA CCGGGTGGCC GTGGCACAGA |
| 59401 | CGCTGGCCCG GCGCACACAC TTCGCCCACC GCGCCGTGCT GCTCGGTGAC ACCGTCATCA |
| 59461 | CCACACCCCC CGCGGACCGG CCCGACGAAC TCGTCTTCGT CTACTCCGGC CAGGGCACCC |
| 59521 | AGCATCCCGC GATGGGCGAG CAGCTCGCCG CCGCCCATCC CGTGTTCGCC GACGCCTGGC |
| 59581 | ATGAAGCGCT CCGCCGCCTT GACAACCCCG ACCCCCACGA CCCCACGCAC AGCCAGCATG |
| 59641 | TGCTCTTCGC CCACCAGGCG GCGTTCACCG CCCTCCTGCG GTCCTGGGGC ATCACCCCGC |
| 59701 | ACGCGGTCAT CGGCCAGTCG CTGGGCGAGA TCACCGCGGC GCACGCCGCC GGCATCCTGT |
| 59761 | CGCTGGACGA CGCGTGCACC CTGATCACCA CGCGCGCCCG CCTCATGCAC ACGCTCCCGC |
| 59821 | GACCCGGTGC CATGGTCACC GTACTGACCA GCGAAGAGAA GGCACGCCAG GCGTTGCGGC |
| 59881 | CGGGCGTGGA GATCGCCGCC GTCAACGGGC CCCACTCCAT CGTGCTGTCC GGGGACGAGG |
| 59941 | ACGCCGTGCT CACCGTCGCC GGGCAGCTCG GCATCCACCA CCGCCTGCCC GCCCCGCACG |
| 60001 | CCGGGCACTC CGCGCACATG GAGCCCGTGG CCGCCGAGCT GCTCGCCACC ACCCGCGGGC |
| 60061 | TCCGCTACCA CCCTCCCCAC ACCTCCATTC CGAACGACCC CACCACCGCT GAGTACTGGG |
| 60121 | CCGAGCAGGT CCGCAAGCCC GTGCTGTTCC ACGCCCACGC GCAGCAGTAC CCGGACGCCG |
| 60181 | TGTTCGTGGA GATCGGCCCC GGCCAGGACC TCTCCCCGCT CGTCGACGGG ATCCCGCTGC |
| 60241 | AGAACGGCAC CGCGGACGAG GTGCACGCGC TGCACACCGC GCTCGCGCAC CTCTACGCGC |
| 60301 | GCGGTGCCAC GCTCGACTGG CCCCGCATCC TCGGGGCTGG GTCACGGCAC GACGCGGATG |
| 60361 | TGCCCGCGTA CGCGTTCCAA CGGCGGCACT ACTGGATCGA GTCGGCACGC CCGGCCGCAT |
| 60421 | CCGACGCGGG CCACCCCGTG CTGGGCTCCG GTATCGCCCT CGCCGGGTCG CCGGGCCGGG |
| 60481 | TGTTCACGGG TTCCGTGCCG ACCGGTGCGG ACCGCGCGGT GTTCGTCGCC GAGCTGGCGC |
| 60541 | TGGCCGCCGC GGACGCGGTC GACTGCGCCA CGGTCGAGCG GCTCGACATC GCCTCCGTGC |
| 60601 | CCGGCCGGCC GGGCCATGGC CGGACGACCG TACAGACCTG GGTCGACGAG CCGGCGGACG |
| 60661 | ACGGCCGGCG CCGGTTCACC GTGCACACCC GCACCGGCGA CGCCCCGTGG ACGCTGCACG |
| 60721 | CCGAGGGGGT GCTGCGCCCC CATGGCACGG CCCTGCCCGA TGCGGCCGAC GCCGAGTGGC |
| 60781 | CCCCACCGGG CGCGGTGCCC GCGGACGGGC TGCCGGGTGT GTGGCGCCGG GGGGACCAGG |
| 60841 | TCTTCGCCGA GGCCGAGGTG GACGGACCGG ACGGTTTCGT GGTGCACCCC GACCTGCTCG |
| 60901 | ACGCGGTCTT CTCCGCGGTC GGCGACGGAA GCCGCCAGCC GGCCGGATGG CGCGACCTGA |
| 60961 | CGGTGCACGC GTCGGACGCC ACCGTACTGC GCGCCTGCCT CACCCGGCGC ACCGACGGAG |
| 61021 | CCATGGGATT CGCCGCCTTC GACGGCGCCG GCCTGCCGGT ACTCACCGCG GAGGCGGTGA |
| 61081 | CGCTGCGGGA GGTGGCGTCA CCGTCCGGCT CCGAGGAGTC GGACGGGCTG CACCGGTTGG |
| 61141 | AGTGGCTCGC GGTCGCCGAG GCGGTCTACG ACGGTGACCT GCCCGAGGGA CATGTCCTGA |
| 61201 | TCACCGCCGC CCACCCCGAC GACCCCGAGG ACATACCCAC CCGCGCCCAC ACCCGCGCCA |
| 61261 | CCGGCGTCCT GACCGCCCTG CAACACCACC TCACCACCAC CGACCACACC CTCATCGTCC |
| 61321 | ACACCACCAC CGACCCCGCC GGCGCCACCG TCACCGGCCT CACCCGCACC GCCCAGAACG |
| 61381 | AACACCCCCA CCGCATCCGC CTCATCGAAA CCGACCACCC CCACACCCCC CTCCCCCTGG |
| 61441 | CCCAACTCGC CACCCTCGAC CACCCCCACC TCCGCCTCAC CCACCACACC CTCCACCACC |
| 61501 | CCCACCTCAC CCCCCTCCAC ACCACCACCC CACCCACCAC CACCCCCCTC AACCCCGAAC |
| 61561 | ACGCCATCAT CATCACCGGC GGCTCCGGCA CCCTCGCCGG CATCCTCGCC CGCCACCTGA |
| 61621 | ACCACCCCCA CACCTACCTC CTCTCCCGCA CCCCACCCCC CGACGCCACC CCCGGCACCC |
| 61681 | ACCTCCCCTG CGACGTCGGC GACCCCCACC AACTCGCCAC CACCCTCACC CACATCCCCC |
| 61741 | AACCCCTCAC CGCCATCTTC CACACCGCCG CCACCCTCGA CGACGGCATC CTCCACGCCC |
| 61801 | TCACCCCCGA CCGCCTCACC ACCGTCCTCC ACCCCAAAGC CAACGCCGCC TGGCACCTGC |
| 61861 | ACCACCTCAC CCAAAACCAA CCCCTCACCC ACTTCGTCCT CTACTCCAGC GCCGCCGCCG |
| 61921 | TCCTCGGCAG CCCCGGACAA GGAAACTACG CCGCCGCCAA CGCCTTCCTC GACGCCCTCG |
| 61981 | CCACGCACCG CCACACCCTC GGCCAACCCG CCACCTCCAT CGCCTGGGGC ATGTGGCACA |
| 62041 | OCACCAGGAC CCTCACCGGA CAACTCGACG ACGCCGACCG GGACCGCATC CGCCGCGGCG |
| 62101 | GTTTCCTCCC GATCACGGAC GACGAGGGCA TGCGCCTCTA CGAGGCGGCC GTCGGCTCCG |
| 62161 | GCGAGGACTT CGTCATGGCC GCCGCGATGG ACCCGGCACA GCCGATGACC GGCTCCGTAC |
| 62221 | CGCCCATCCT GAGCGGCCTG CGCAGGAGCG CGCGGCGCGT CGCCCGTGCC GGGCAGACGT |
| 62281 | TCGCCCAGCG GCTCGCCGAG CTGCCCGACG CCGACCGCGG CGCGGCGCTG ACCACCCTCG |
| 62341 | TCTCGGACGC CACGGCCGCC GTGCTCGGCC ACGCCGACGC CTCCGAGATC GCGCCGACCA |
| 62401 | CGACGTTCAA GGACCTCGGC ATCGACTCGC TCACCGCGAT CGAGCTGCGC AACCGGCTCG |
| 62461 | CGGAGGCGAC CGGGCTGCGG CTGAGTGCCA CGCTGGTGTT CGACCACCCG ACACCTCGGG |
| 62521 | TCCTCGCCGC CAAGCTCCGC ACCGATCTGT TCGGCACGGC CGTGCCCACG CCCGCGCGGA |
| 62581 | CGGCACGGAC CCACCACGAC GAGCCACTCG CGATCGTCGG CATGGCGTGC CGACTGCCCG |
| 62641 | GCGGGGTCGC CTCGCCGGAG GACCTGTGGC AGCTCGTGGC GTCCGGCACC GACGCGATCA |
| 62701 | CCGAGTTCCC CACCGACCGC GGCTGGGACA TCGACCGGCT GTTCGACCCG GACCCGGACG |
| 62761 | CCCCCGGCAA GACCTACGTC CGGCACGGCG GCTTCCTCGC CGAGGCCGCC GGCTTCGATG |
| 62821 | CCGCGTTCTT CGGCATCAGC CCGCGCGAGG CACGGGCCAT GGACCCGCAG CAGCGCGTCA |
| 62881 | TCCTCGAAAC CTCCTGGGAG GCGTTCGAGA ACGCGGGCAT CGTGCCGGAC ACGCTGCGCG |
| 62941 | GCAGCGACAC CGGCGTGTTC ATGGGCGCGT TCTCCCATGG GTACGGCGCC GGCGTCGACC |
| 63001 | TGGGCGGGTT CGGCGCCACC GCCACGCAGA ACAGCGTGCT CTCCGGCCGG TTGTCGTACT |
| 63061 | TCTTCGGCAT GGAGGGCCCG GCCGTCACCG TCGACACCGC CTGCTCGTCG TCGCTGGTCG |
| 63121 | CCCTGCACCA GGCGGCACAG GCGCTGCGGA CTGGAGAATG CTCGCTGGCG CTCGCCGGCG |
| 63181 | GTGTCACGGT GATGCCCACC CCGCTGGGCT ACGTCGAGTT CTGCCGCCAG CGGGGACTCG |
| 63241 | CCCCCGACGG CCGTTGCCAG GCCTTCGCGG AAGGCGCCGA CGGCACGAGC TTCTCGGAGG |
| 63301 | GCGCCGGCGT TCTTGTGCTG GAGCGGCTCT CCGACGCCGA GCGCAACGGA CACACCGTCC |
| 63361 | TCGCGGTCGT CCGCTCCTCC GCCGTCAACC AGGACGGCGC CTCCAACGGC ATCTCCGCAC |
| 63421 | CCAACGGCCC CTCCCAGCAG CGCGTCATCC GCCAGGCCCT CGACAAGGCC GGGCTCGCCC |
| 63481 | CCGCCGACGT GGACGTGGTG GAGGCCCACG GCACCGGAAC CCCGCTGGGC GACCCGATCG |
| 63541 | AGGCACAGGC CATCATCGCG ACCTACGGCC AGGACCGCGA CACACCGCTC TACCTCGGTT |
| 63601 | CGGTCAAGTC GAACATCGGA CACACCCAGA CCACCGCCGG TGTCGCCGGC GTCATCAAGA |
| 63661 | TGGTCATGGC GATGCGCCAC GGCATCGCGC CGAAGACACT GCACGTGGAC GAGCCGTCGT |
| 63721 | CGCATGTGGA CTGGACCGAG GGTGCGGTGG AACTGCTCAC CGAGGCGAGG CCGTGGCCCG |
| 63781 | ACGCGGGACG CCCGCGCCGC GCGGGCGTGT CGTCGCTCGG TATCAGCGGT ACGAACGCCC |
| 63841 | ACGTGATCCT TGAGGGTGTT CCCGGGCCGT CGCGTGTGGA GCCGTCTGTT GACGGGTTGG |
| 63901 | TGCCGTTGCC GGTGTCGGCT CGGAGTGAGG CGAGTCTGCG GGGGCAGGTG GAGCGGCTGG |
| 63961 | AGGGGTATCT GCGCGGGAGT GTGGATGTGG CCGCGGTCGC GCAGGGGTTG GTGCGTGAGC |
| 64021 | GTGCTGTCTT CGGTCACCGT GCGGTACTGC TGGGTGATGC CCGGGTGATG GGTGTGGCGG |
| 64081 | TGGATCAGCC GCGTACGGTG TTCGTCTTTC CCGGGCAGGG TGCTCAGTGG GTGGGCATGG |
| 64141 | GTGTGGAGTT GATGGACCGT TCTGCGGTGT TCGCGGCTCG TATGGAGGAG TGTGCGCGGG |
| 64201 | CGTTGTTGCC GCACACGGGC TGGGATGTGC GGGAGATGTT GGCGCGGCCG GATGTGGCGG |
| 64261 | AGCGGGTGGA GGTGGTCCAG CCGGCCAGCT GGGCGGTCGC GGTCAGCCTG GCCGCACTGT |
| 64321 | GGCAGGCCCA CGGGGTCGTA CCCGACGCGG TGATCGGACA CTCCCAGGGC GAGATCGCGG |
| 64381 | CGGCGTGCGT GGCCGGGGCC CTCAGCCTTG AGGACGCCGC CCGCGTGGTG GCCTTGCGCA |
| 64441 | GCCAGGTCAT CGCGGCGCGA CTGGCCGGGC GGGGAGCGAT GGCTTCGGTG GCATTGCCGG |
| 64501 | CCGGTGAGGT CGGTCTGGTC GAGGGCGTGT GGATCGCGGC GCGTAACGGC CCCGCCTCGA |
| 64561 | CAGTCGTGGC CGGCGAGCCG TCGGCGGTGG AGGACGTGGT GACGCGGTAT GAGACCGAAG |
| 64621 | GCGTGCGAGT GCGTCGTATC GCCGTCGACT ACGCCTCCCA CACGCCCCAC GTGGAAGCCA |
| 64681 | TCGAGGACGA ACTCGCTGAG GTACTGAAGG GAGTTGCAGG GAAGGCCGCG TCGGTGGCGT |
| 64741 | GGTGGTCGAC CGTGGACAGC GCCTGGGTGA CCGAGCCGGT GGATGAGAGT TACTGGTACC |
| 64801 | GGAACCTGCG TCGCCCCGTC GCGCTGGACG CGGCGGTGGC GGAGCTGGAC GGGTCCGTGT |
| 64861 | TCGTGGAGTG CAGCGCCCAT CCGGTGCTGC TGCCGGCGAT GGAACAGGCC CACACGGTGG |
| 64921 | CGTCGTTGCG CACCGGTGAC GGCGGCTGGG AGCGATGGCT GACGGCGTTG GCGCAGGCGT |
| 64981 | GGACCCTGGG CGCGGCAGTG GACTGGGACA CGGTGGTCGA ACCGGTGCCA GGGCGGCTGC |
| 65041 | TCGATCTGCC CACCTACGCG TTCGAGCGCC GGCGCTACTG GCTGGAAGCG GCCGGTGCCA |
| 65101 | CCGACCTGTC CGCGGCCGGG CTGACAGGGG CAGCACATCC CATGCTGGCC GCCATCACGG |
| 65161 | CACTACCCGC CGACGACGGT GGTGTTGTTC TCACCGGCCG GATCTCGTTG CGCACGCATC |
| 65221 | CCTGGCTGGC TGATCACGCG GTGCGGGGCA CGGTCCTGCT GCCGGGCACG GCCTTTGTGG |
| 65281 | AGCTGGTCAT CCGGGCCGGT GACGAGACCG GTTGCGGGAT AGTGGATGAA CTGGTCATCG |
| 65341 | AATCCCCCCT CGTGGTGCCG GCGACCGCAG CCGTGGATCT GTCGGTGACC GTGGAAGGAG |
| 65401 | CTGACGAGGC CGGACGGCGG CGAGTGACCG TCCACGCCCG CACCGAAGGC ACCGGCAGCT |
| 65461 | GGACCCGGCA CGCCAGCGGC ACCCTGACCC CCGACACCCC CGACACCCCC AACGCTTCCG |
| 65521 | GTGTTGTCGG TGCGGAGCCG TTCTCGCAGT GGCCACCTGC CACTGCCGCG GCCGTCGACA |
| 65581 | CCTCGGAGTT CTACTTGCGC CTGGACGCGC TGGGCTACCG GTTCGGACCC ATGTTCCGCG |
| 65641 | GAATGCGGGC TGCCTGGCGT GATGGTGACA CCGTGTACGC CGAGGTCGCG CTCCCCGAGG |
| 65701 | ACCGTGCCGC CGACGCGGAC GGTTTCGGCA TGCACCCGGC GCTGCTCGAC GCGGCCTTGC |
| 65761 | AGAGCGGCAG CCTGCTCATG CTGGAATCGG ACGGCGAGCA GAGCGTGCAA CTGCCGTTCT |
| 65821 | CCTGGCACGG CGTCCGGTTC CACGCGACGG GCGCGACCAT GCTGCGGGTG GCGGTCGTAC |
| 65881 | CGGGCCCGGA CGGCCTCCGG CTGCATGCCG CGGACAGCGG GAACCGTCCC GTCGCGACGA |
| 65941 | TCGACGCGCT CGTGACCCGG TCCCCGGAAG CGGACCTCGC GCCCGCCGAT CCGATGCTGC |
| 66001 | GGGTCGGGTG GGCCCCGGTG CCCGTACCTG CCGGGGCCGG TCCGTCCGAC GCGGACGTGC |
| 66061 | TGACGCTGCG CGGCGACGAC GCCGACCCGC TCGGGGAGAC CCGGGACCTG ACCACCCGTG |
| 66121 | TTCTCGACGC GCTGCTCCGG GCCGACCGGC CGGTGATCTT CCAGGTGACC GGTGGCCTCG |
| 66181 | CCGCCAAGGC GGCCGCAGGC CTGGTCCGCA CCGCTCAGAA CGAGCAGCCC GGCCGCTTCT |
| 66241 | TCCTCGTCGA AACGGACCCG GGAGAGGTCC TGGACGGCGC GAAGCGCGAC GCGATCGCGG |
| 66301 | CACTCGGCGA GCCCCATGTG CGGCTGCGCG ACGGCCTCTT CGAGGCAGCC CGGCTGATGC |
| 66361 | GGGCCACGCC GTCCCTGACG CTCCCGGACA CCGGGTCGTG GCAGCTGCGG CCGTCCGCCA |
| 66421 | CCGGTTCCCT CGACGACCTT GCCGTCGTCC CCACCGACGC CCCGGACCGG CCGCTCGCGG |
| 66481 | CCGGCGAGGT GCGGATCGCG GTACGCGCGG CGGGCCTGAA CTTCCGGGAT GTCACGGTCG |
| 66541 | CGCTCGGTGT GGTCGCCGAT GCGCGTCCGC TCGGCAGCGA GGCCGCGGGT GTCGTCCTGG |
| 66601 | AGACCGGCCC CGGTGTGCAC GACCTGGCGC CCGGCGACCG GGTCCTGGGG ATGCTCGCGG |
| 66661 | GCGCCTTCGG ACCGGTCGCG ATCACCGACC GGCGGCTGCT CGGCCGGATG CCGGACGGCT |
| 66721 | GGACGTTCCC GCAGGCGGCG TCCGTGATGA CCGCGTTCGC GACCGCGTGG TACGGCCTGG |
| 66781 | TCGACCTGGC CGGGCTGCGC CCCGGCGAGA AGGTCCTGAT CCACGCGGCG GCGACCGGTG |
| 66841 | TCGGCGCGGC GGCCGTCCAG ATCGCGCGGC ATCTGGGCGC GGAGGTGTAC GCGACCACCA |
| 66901 | GCGCCGCGAA GCGCCATCTG GTGGACCTGG ACGGAGCGCA TCTGGCCGAT TCCCGCAGCA |
| 66961 | CCGCGTTCGC CGACGCGTTC CCGCCGGTCG ATGTCGTGCT CAACTCGCTC ACCGGTGAAT |
| 67021 | TCCTCGACGC GTCCGTCGGC CTGCTCGCGG CGGGTGGCCG GTTCATCGAG ATGGGGAAGA |
| 67081 | CGGACATCCG GCACGCCGTC CAGCAGCCGT TCGACCTGAT GGACGCCGGC CCCGACCGGA |
| 67141 | TGCAGCGGAT CATCGTCGAG CTGCTCGGCC TGTTCGCGCG CGACGTGCTG CACCCGCTGC |
| 67201 | CGGTCCACGC CTGGGACGTG CGGCAGGCGC GGGAGGCGTT CGGCTGGATG AGCAGCGGGC |
| 67261 | GTCACACCGG CAAGCTGGTG CTGACGGTCC CGCGGCCGCT GGATCCCGAG GGGGCCGTCG |
| 67321 | TCATCACCGG CGGCTCCGGC ACCCTCGCCG GCATCCTCGC CCGCCACCTG GGCCACCCCC |
| 67381 | ACACCTACCT GCTCTCCCGC ACCCCACCCC CCGACACCAC CCCCGGCACC CACCTCCCCT |
| 67441 | GCGACGTCGG CGACCCCCAC CAACTCGCCA CCACCCTCGC CCGCATCCCC CAACCCCTCA |
| 67501 | CCGCCGTCTT CCACACCGCC GGAACCCTCG ACGACGCCCT GCTCGACAAC CTCACCCCCG |
| 67561 | ACCGCGTCGA CACCGTCCTC AAACCCAAGG CCGACGCCGC CTGGCACCTG CACCGGCTCA |
| 67621 | CCCGCGACAC CGACCTCGCC GCGTTCGTCG TCTACTCCGC GGTCGCCGGC CTCATGGGCA |
| 67681 | GCCCGGGGCA GGGCAACTAC GTCGCGGCGA ACGCGTTCCT CGACGCGCTC GCCGAACACC |
| 67741 | GCCGTGCGCA AGGGCTGCCC GCGCAGTCCC TCGCATGGGG CATGTGGGCG GACGTCAGCG |
| 67801 | CGCTCACCGC GAAACTCACC GACGCGGACC GCCAGCGCAT CCGGCGCAGC GGATTCCCGC |
| 67861 | CGTTGAGCGC CGCGGACGGC ATGCGGCTGT TCGACGCGGC GACGCGTACC CCGGAACCGG |
| 67921 | TCGTCGTCGC GACGACCGTC GACCTCACCC AGCTCGACGG CGCCGTCGCG CCGTTGCTCC |
| 67981 | GCGGTCTGGC CGCGCACCGG GCCGGGCCGG CGCGCACGGT CGCCCGCAAC GCCGGCGAAG |
| 68041 | AGCCCCTGGC CGTGCGTCTT GCCGGGCGTA CCGCCGCCGA GCAGCGGCGC ATCATGCAGG |
| 68101 | AGGTCGTGCT CCGCCACGCG GCCGCGGTCC TCGCGTACGG GCTGGGCGAC CGCGTGGCGG |
| 68161 | CGGACCGTCC GTTCCGCGAG CTCGGTTTCG ATTCGCTGAC CGCGGTCGAC CTGCGCAATC |
| 68221 | GGCTCGCGGC CGAGACGGGG CTGCGGCTGC CGACGACGCT GGTGTTCAGC CACCCGACGG |
| 68281 | CGGAGGCGCT CACCGCCCAC CTGCTCGACC TGATCGACGC TCCCACCGCC CGGATCGCCG |
| 68341 | GGGAGTCCCT GCCCGCGGTG ACGGCCGCTC CCGTGGCGGC CGCGCGGGAC CAGGACGAGC |
| 68401 | CGATCGCCAT CGTGGCGATG GCGTGCCGGC TGCCCGGTGG TGTGACGTCG CCCGAGGACC |
| 68461 | TGTGGCGGCT CGTCGAGTCC GGCACCGACG CGATCACCAC GCCTCCTGAC GACCGCGGCT |
| 68521 | GGGACGTCGA CGCGCTGTAC GACGCGGACC CGGACGCGGC CGGCAAGGCG TACAACCTGC |
| 68581 | GGGGCGGTTA CCTGGCCGGG GCGGCGGAGT TCGACGCGGC GTTCTTCGAC ATCAGTCCGC |
| 68641 | GCGAAGCGCT CGGCATGGAC CCGCAGCAAC GCCTGCTGCT CGAAACGGCG TGGGAGGCGA |
| 68701 | TCGAGCGCGG CCGGATCAGT CCGGCGTCGC TCCGCGGCCG GGAGGTCGGC GTCTATGTCG |
| 68761 | GTGCGGCCGC GCAGGGCTAC GGGCTGGGCG CCGAGGACAC CGAGGGCCAC GCGATCACCG |
| 68821 | GTGGTTCCAC GAGCCTGCTG TCCGGACGGC TGGCGTACGT GCTCGGGCTG GAGGGCCCGG |
| 68881 | CGGTCACCGT GGACACGGCG TGCTCGTCGT CTCTGGTCGC GCTGCATCTG GCGTGCCAGG |
| 68941 | GGCTGCGCCT GGGCGAGTGC GAACTCGCTC TGGCCGGAGG GGTCTCCGTA CTGAGTTCGC |
| 69001 | CGGCCGCGTT CGTGGAGTTC TCCCGCCAGC GCGGGCTCGC GGCCGACGGG CGCTGCAAGT |
| 69061 | CGTTCGGCGC GGGCGCGGAC GGCACGACGT GGTCCGAGGG CGTGGGCGTG CTCGTACTGG |
| 69121 | AACGGCTCTC CGACGCCGAG CGGCTCGGGC ACACCGTGCT CGCCGTCGTC CGCGGCAGCG |
| 69181 | CCGTCACGTC CGACGGCGCC TCCAACGGCC TCACCGCGCC GAACGGGCTC TCGCAGCAGC |
| 69241 | GGGTCATCCG GAAGGCGCTC GCCGCGGCCG GGCTGACCGG CGCCGACGTG GACGTCGTCG |
| 69301 | AGGGGCACGG CACCGGCACC CGGCTCGGCG ACCCGGTCGA GGCGGACGCG CTGCTCGCGA |
| 69361 | CGTACGGGCA GGACCGTCCG GCACCGGTCT GGCTGGGCTC GCTGAAGTCG AACATCGGAC |
| 69421 | ATGCCACGGC CGCGGCCGGT GTCGCGGGCG TCATCAAGAT GGTGCAGGCG ATCGGCGCGG |
| 69481 | GCACGATGCC GCGGACGCTG CATGTGGAGG AGCCCTCGCC CGCCGTCGAC TGGAGCACCG |
| 69541 | GACAGGTGTC CCTGCTCGGC TCCAACCGGC CCTGGCCGGA CGACGAGCGT CCGCGCCGGG |
| 69601 | CGGCCGTCTC CGCGTTCGGG CTCAGCGGGA CGAACGCGCA CGTCATCCTG GAACAGCACC |
| 69661 | GTCCGGCGCC CGTGGCGTCC CAGCCGCCCC GGCCGCCCCG TGAGGAGTCC CAGCCGCTGC |
| 69721 | CGTGGGTGCT CTCCGCGCGG ACTCCGGCCG CGCTGCGGGC CCAGGCGGCC CGGCTGCGCG |
| 69781 | ACCACCTCGC GGCGGCACCG GACGCGGATC CGTTGGACAT CGGGTACGCG CTGGCCACCA |
| 69841 | GCCGCGCCCA GTTCGCCGAC CGTGCCGCGG TCGTCGCCAC CACCCCGGAC GGATTCCGTG |
| 69901 | CCGCGCTCGA CGGCCTCGCG GACGGCGCGG AGGCGCCCGG AGTCGTCACC GGGACCGCTC |
| 69961 | AGGAGCGGCG CGTCGCCTTC CTCTTCGACG GCCAGGGCGC CCAGCGCGCC GGAATGGGGC |
| 70021 | GCGAGCTCCA CCGCCGGTTC CCCGTCTTCG CCGCCGCGTG GGACGAGGTC TCCGACGCGT |
| 70081 | TCGGCAAGCA CCTCAAGCAC TCCCCCACGG ACGTCTACCA CGGCGAACAC GGCGCTCTCG |
| 70141 | CCCATGACAC CCTGTACGCC CAGGCCGGCC TGTTCACGCT CGAAGTGGCG CTGCTGCGGC |
| 70201 | TGCTGGAGCA CTGGGGGGTG CGGCCGGACG TGCTCGTCGG GCACTCCGTC GGCGAGGTGA |
| 70261 | CCGCGGCGTA CGCGGCGGGG GTGCTCACCC TGGCGGACGC GACGGAGTTG ATCGTGGCCC |
| 70321 | GGGGGCGGGC GCTGCGGGCG CTGCCGCCCG GGGCGATGCT CGCCGTCGAC GGAAGCCCGG |
| 70381 | CGGAGGTCGG CGCCCGCACG GATCTGGACA TCGCCGCGGT CAACGGCCCG TCCGCCGTGG |
| 70441 | TGCTCGGCGG TTCGCCGGAC GATGTGGCGG CGTTCGAACG GGAGTGGTCG GCGGCCGGGC |
| 70501 | GGCGCACGAA ACGGCTCGAC GTCGGGCACG CGTTCCACTC CCGGCACGTC GACGGTGCGC |
| 70561 | TCGACGGCTT CCGTACGGTG CTGGAGTCGC TCGCGTTCGG CGCGGCGCGG CTGCCGGTGG |
| 70621 | TGTCCACGAC GACGGGCCGG GACGCCGCGG ACGACCTCAT AACGCCCGCG CACTGGCTGC |
| 70681 | GCCATGCGCG TCGGCCGGTG CTGTTCTCGG ATGCCGTCCG GGAGCTGGCC GACCGCGGCG |
| 70741 | TCACCACGTT CGTGGCCGTC GGCCCCTCCG GCTCCCTGGC GTCGGCCGCG GCGGAGAGCG |
| 70801 | CCGGGGAGGA CGCCGGGACC TACCACGCGG TGCTGCGCGC CCGGACCGGT GAGGAGACCG |
| 70861 | CGGCGCTGAC CGCCCTCGCC GAGCTGCACG CCCACGGCGT CCCGGTCGAC CTGGCCGCGG |
| 70921 | TACTGGCCGG TGGCCGGCCA GTGGACCTTC CCGTGTACGC GTTCCAGCAC CGTTCCTACT |
| 70981 | GGCTGGCCCC GGCCGTGGCG GGGGCGCCGG CCACCGTGGC GGACACCGGG GGTCCGGCGG |
| 71041 | AGTCCGAGCC GGAGGACCTC ACCGTCGCCG AGATCGTCCG TCGGCGCACC GCGGCGCTGC |
| 71101 | TCGGCGTCAC GGACCCCGCC GACGTCGATG CGGAAGCGAC GTTCTTCGCG CTCGGTTTCG |
| 71161 | ACTCACTGGC GGTGCAGCGG CTGCGCAACC AGCTCGCCTC GGCAACCGGG CTGGACCTGC |
| 71221 | CGGCGGCCGT CCTGTTCGAC CACGACACCC CGGCCGCGCT CACCGCGTTC CTCCAGGACC |
| 71281 | GGATCGAGGC CGGCCAGGAC CGGATCGAGG CCGGCGAGGA CGACGACGCG CCCACCGTGC |
| 71341 | TCTCGCTCCT GGAGGAGATG GAGTCGCTCG ACGCCGCGGA CATCGCGGCG ACGCCGGCCC |
| 71401 | CGGAGCGTGC GGCCATCGCC GATCTGCTCG ACAAGCTCGC CCATACCTGG AAGGACTACC |
| 71461 | GATGAGCACC GATACGCACG AGGGAACGCC GCCCGCCGGC CGCTGCCCAT TCGCGATCCA |
| 71521 | GGACGGTCAC CGCGCCATCC TGGAGAGCGG CACGGTGGGT TCGTTCGACC TGTTCGGCGT |
| 71581 | CAAGCACTGG CTGGTCGCCG CCGCCGAGGA CGTCAAGCTG GTCACCAACG ATCCGCGGTT |
| 71641 | CAGCTCGGCC GCGCCGTCCG AGATGCTGCC CGACCGGCGG CCCGGCTGGT TCTCCGGGAT |
| 71701 | GGACTCACCG GAGCACAACC GCTACCGGCA GAAGATCGCG GGGGACTTCA CACTGCGCGC |
| 71761 | GGCGCGCAAG CGGGAGGACT TCGTCGCCGA GGCCGCCGAC GCCTGCCTGG ACGACATCGA |
| 71821 | GGCCGCGGGA CCCGGCACCG ACCTCATCCC CGGGTACGCC AAGCGGCTGC CCTCCCTCGT |
| 71881 | CATCAACGCG CTGTACGGGC TCACCCCTGA GGAGGGGGCC GTGCTGGAGG CACGGATGCG |
| 71941 | CGACATCACC GGCTCGGCCG ATCTGGACAG CGTCAAGACG CTGACCGACG ACTTCTTCGG |
| 72001 | GCACGCGCTG CGGCTGGTCC GCGCGAAGCG TGACGAGCGG GGCGAGGACC TGCTGCACCG |
| 72061 | GCTGGCCTCG GCCGACGACG GCGAGATCTC GCTCAGCGAC GACGAGGCGA CGGGCGTGTT |
| 72121 | CGCGACGCTG CTGTTCGCCG GCCACGACTC GGTGCAGCAG ATGGTCGGCT ACTGCCTCTA |
| 72181 | CGCACTGCTC AGCCACCCCG AGCAGCAGGC GGCGCTGCGC GCGCGCCCGG AGCTGGTCGA |
| 72241 | CAACGCGGTC GAGGAGATGC TCCGTTTCCT GCCCGTCAAC CAGATGGGCG TACCGCGCGT |
| 72301 | CTGTGTCGAG GACGTCGATG TGCGGGGCGT GCGCATCCGT GCGGGCGACA ACGTGATCCC |
| 72361 | GCTCTACTCG ACGGCCAACC GCGACCCCGA GGTGTTCCCG CAGCCCGACA CCTTCGATGT |
| 72421 | GACGCGCCCG CTGGAGGGCA ACTTCGCGTT CGGCCACGGC ATTCACAAGT GTCCCGGCCA |
| 72481 | GCACATCGCC CGGGTGCTCA TCAAGGTCGC CTGCCTGCGG TTGTTCGAGC GTTTCCCGGA |
| 72541 | CGTCCGGCTG GCGGGCGACG TGCCGATGAA CGAGGGGCTC GGGCTGTTCA GCCCGGCCGA |
| 72601 | GCTGCGGGTC ACCTGGGGGG CGGCATGAGT CACCCGGTGG AGACGTTGCG GTTGCCGAAC |
| 72661 | GGGACGACGG TCGCGCACAT CAACGCGGGC GAGGCGCAGT TCCTCTACCG GGAGATCTTC |
| 72721 | ACCCAGCGCT GCTACCTGCG CCACGGTGTC GACCTGCGCC CGGGGGACGT GGTGTTCGAC |
| 72781 | GTCGGCGCGA ACATCGGCAT GTTCACGCTT TTCGCGCATC TGGAGTGTCC TGGTGTGACC |
| 72841 | GTGCACGCCT TCGAGCCCGC GCCCGTGCCG TTCGCGGCGC TGCGGGCGAA CGTGACGCGG |
| 72901 | CACGGCATCC CGGGCCAGGC GGACCAGTGC GCGGTCTCCG ACAGCTCCGG CAGCCGGAAG |
| 72961 | ATGACCTTCT ATCCCGACGC CACGCTGATG TCCGGTTTCC ACGCGGATGC CGCGGCCCGG |
| 73021 | ACGGAGCTGT TGCGCACGCT CGGCCTCAAC GGCGGCTACA CCGCCGAGGA CGTCGACACC |
| 73081 | ATGCTCGCGC AACTGCCCGA CGTCAGCGAG GAGATCGAAA CCCCTGTGGT CCGGCTCTCC |
| 73141 | GACGTCATCG CGGAGCGCGG TATCGAGGCC ATCGGCCTGC TGAAGGTCGA CGTGGAGAAG |
| 73201 | AGCGAACGGC AGGTCTTCGC CGGCCTCGAG GACACCGACT GGCCCCGTAT CCGCCAGGTC |
| 73261 | GTCGCGGAGG TCCACGACAT CGACGGCGCG CTCGAGGAGG TCGTCACGCT GCTCCGCGGC |
| 73321 | CATGGCTTCA CCGTGGTCGC CGAGCAGGAA CCGCTGTTCG CCGGCACGGG CATCCACCAG |
| 73381 | GTCGCCGCGC GGCGGGTGGC CGGCTGAGCG CCGTCGGGGC CGCGGCCGTC CGCACCGGCG |
| 73441 | GCCGCGGTGC GGACGGCGGC TCAGCCGGCG TCGGACAGTT CCTTGGGCAG TTGCTGACGG |
| 73501 | CCCTTCACCC CCAGCTTGCG GAACACGTTG GTGAGGTGCT GTTCCACCGT GCTGGAGGTG |
| 73561 | ACGAACAGCT GGCTGGCGAT CTCCTTGTTG GTGCGCCCGA CCGCGGCGTG CGACGCCACC |
| 73621 | GGCCGCTCCG CCTCGGTCAG CGATGTGATC CGCTGCGCCG GCGTCACGTG CTGGGTGCCG |
| 73681 | TCCGCGTCCG AGGACTCCCC ACCGAGCCGC CGGAGGAGCG GCACGGCTCC GCACTGGGTC |
| 73741 | GCGAGGTGCC GTGCGCGGCG GAACAGTCCC CGCGCACGGC TGTGCCGCCG GAGCATGCCG |
| 73801 | CACGCTTCGC CCATGTCGGC GAGGACGCGG GCCAGCTCGT ACTGGTCGCG GCACATGATG |
| 73861 | AGCAGATCGG CGGCCTCGTC GAGCAGTTCG ATCCGCTTGG CCGGCGGACT GTAGGCCGCC |
| 73921 | TGCACCCGCA GCGTCATCAC CCGCGCCCGG GACCCCATCG GCCGGGACAG CTGCTCGGAG |
| 73981 | ATGAGCCTCA GCCCCTCGTC ACGGCCGCGG CCGAGCAGCA GAAGCGCTTC GGCGGCGTCG |
| 74041 | ACCCGCCACA GGGCCAGGCC CGGCACGTCG ACGGACCAGC GTCGCATCCG CTCCCCGCAG |
| 74101 | TCCCGGAACG CGTTGTACGC CGCCCGGTAC CGCCCGGCCG CGAGATGGTG TTGCCCACGG |
| 74161 | GCCCAGACCA TGTGCAGTCC GAAGAGGCTG TCGGAGGTCT CCTCCGGCAA CGGCTCGGCG |
| 74221 | AGCCACCGCT CCGCCCGGTC CAGGTCGCCC AGTCGGATCG CGGCGGCCAC GGTGCTGCTC |
| 74281 | AGCGGCAATG CGGCGGCCAT CCCCCAGGAG GGCACGACCC GGGGGGCGAG CGCGGCCTCG |
| 74341 | CCGCATTCGA CGGCGGCGGT CAGGTCGCCG CGGCGCAGCG CGGCCTCGGC GCGGAACCCC |
| 74401 | GCGTGGACCG CCTCGTCGGC CGGGGTCCGC ATGTTGTCGT CACCGGCCAG CTTGTCGACC |
| 74461 | CAGGACTGGA CGGCATCGGT GTCCTCGGCG TAGAGCAGGG CCAGCAACGC CATCATGGTC |
| 74521 | GTGGTCCGGT CCGTCGTGAC CCGGGAGTGC TGGAGCACGT ACTCGGCTTT GGCCTCGGCC |
| 74581 | TGTTCGGACC AGCCGCGCAG CGCGTTGCTC AGGGCCTTGT CGGCGACGGC GCGGTGCCGG |
| 74641 | ACGGCTCCGG AAAACGAGGC GACCTCGTCC TCGGCCGGCG GATCGGCCGG ACGCGGCGGA |
| 74701 | TCGGCCGCGC CGGGATAGAT CAGCGCGAGG GACAGGTCCG CGACGCGCAG GTGCGCCCGG |
| 74761 | CCCTGCTCGC TCGGGGCGGC GGAGCGCTGG GCCGCCAGGA CCTCGGCGGC CTCGCCCGGC |
| 74821 | CGCCCGTCCA TCGCCAGCCA GCAGGCGAGC GACACGGCGT GCTCGCTGGA GAGGAGCCGT |
| 74881 | TCCCGCGACG CGGTGAGCAG CTCGGGCACA TGCCGGCCGG ATCTGGCGGG ATCGCAGAGC |
| 74941 | CGCTCGATGG CGGCGGTGTC GACGCGCAGT GCGGCGTGGA CGGCGGGGTC GTCGGAGGCC |
| 75001 | CGGTAGGCGA ACTCCAGGTA GGTGACGGCC TCGTCGAGCT CGCCGCGCAG GTGGTGCTCG |
| 75061 | CGCGCGGCGT CGGTGAACAG CCCGGCGACC TCGGCGCCGT GCACCCGGCC GGTACCCATC |
| 75121 | TGGTGGCGGG CGAGCACCTT GCTGGCCACG CCGCGGTCCC GCAGCAGTTC CAGCGCCAGC |
| 75181 | TCGTGCAGGC CACGCCGCTC GGCGGCGGAG AGGTCGTCGA GTACGACGGA GCGGGCCGCG |
| 75241 | GGGTGCGGGA ACCGCCCTTC CCGCAGCAGC CGCCCCTCGA CCAGCTGTTC GTGGGCCTGC |
| 75301 | TCGACCGCCT CGGTGTCGAG GCCGGTCATC CGCTGGACGA GGGTGAGTTC GACACTCTCG |
| 75361 | CCGAGCACGG CGGAAGCTCG GGCGACGCTC AGCGCGGCCG GGCCGCAACG ATAGAGCGAC |
| 75421 | CCGAGGTAGG CGAGCCGGTA CGCCCGCCCC GCGACCACTT CCAGGCACCC TGAGGTCCGT |
| 75481 | GTCCGTGCCT CCCGGATGTC GTCGATCAGG CCGTGGCCGA GGAGCAGGTT GCCGCCGGTC |
| 75541 | GCCCGGAACG CCTGGGCCAC CACGTCGTCG TGCGCGTCCT GGCCGAGGTG CCGGCGCACG |
| 75601 | AGTTCGGTGG TCTGCGCCTC GGTGAGCGGG CGCAGCGCGA TCTCCTGGTA GTGGCGCAGA |
| 75661 | CTCAGCAGTG CCGCCCGGAA TTGGGAGTGG GCGGGCGTCG GCCGGAGCAG CTCGGTCAGC |
| 75721 | ACGATGGCGA CACGGGCCCG GCTGATGCGG CGCGCGAGGT GGAGCAGGCA GCGCAGCGAC |
| 75781 | GGCGCGTCGG CGTGGTGCAC GTCGTCGATG CCGATCAGTA CGGGCCGCTC CGCGGCGAGC |
| 75841 | GTCAGCACCG TGCGGGTGAG TTCGGTCCCC AGGCGGTTGT CGACGTCGGC CGGCAGGTTT |
| 75901 | TCGCACGATG CCGTCAGCCG GACCAGCTCC GGTGTCCGGG CGGCCAGCTC GGGCTGGTCG |
| 75961 | AGGAGCTGGC CGAGCATGCC GTACGGCAGG GCCCGCTCCT CCATGGAGCA CACCGCGCGA |
| 76021 | AGGGTGACGA AGCCGGCCTT GGCCGCGGCG GCGTCGAGGA GTTCGGTCTT GCCGCAGGCG |
| 76081 | ATCGGCCCGG TGACGGCGGC GACGACGCCC CGCCCGCCCC CCGCTCGGGT GAGCGCCCGG |
| 76141 | TGGAGGGAAC CGAACTCGTC ATCGCGGGCG ATCAGGTCTG GGGGAGATAA GCGCGCTATC |
| 76201 | ACGAATGGAA CTACCTCGCG ACCGTCGTGG AAACCCATAG GCATCACATG GCTTGTTGAT |
| 76261 | CTGTACGGCT GTGATTCAGC CTGGCGGGAT GCTGTGCTAC AGATGGGAAG ATGTGATCTA |
| 76321 | GGGCCGTGCC GTTCCCTCAG GAGCCGACCG CCCCCGGCGC CACCCGCCGT ACCCCCTGGG |
| 76381 | CCACCAGCTC GGCGACCCGC TCCTGGTGGT CGACGAGGTA GAAGTGCCCG CCGGGGAAGA |
| 76441 | CCTCCACCGT GGTCGGCGCG GTCGTGTGCC OGGOCCAGGO GTGGGCCTGC TCCACCGTCG |
| 76501 | TCTTCGGATC GTCGTCACCG ATGCACACCG TGATCGGCGT CTCCAGCGGC GGCGCGGGCT |
| 76561 | CCCACCGGTA CGTCTCCGCC GCGTAGTAGT CCGCCCGCAA CGGCGCCAGG ATCAGCGCGC |
| 76621 | GCATTTCGTC GTCCGCCATC ACATCGGCGC TCGTCCCGCC GAGGCCGATG ACCGCCGCCA |
| 76681 | GCAGCTCGTC GTCGGACGCG AGGTGGTCCT GGTCGGCGCG CGGCTGCGAC GGCGCCCGCC |
| 76741 | GGCCCGAGAC GATCAGGTGC GCCACCGGGA GCCGCTGGGC CAGCTCGAAC GCGAGTGTCG |
| 76801 | CGCCCATGCT GTGGCCGAAC AGCACCAGCG GACGGTCCAG CCCCGGCTTC AACGCCTCGG |
| 76861 | CCACGAGGCC GGCGAGAACA CGCAGGTCGC GCACCGCCTC CTCGTCGCGG CGGTCCTGGC |
| 76921 | GGCCGGGGTA CTGCACGGCG TACACGTCCG CCACCGGGGC GAGCGCACGG GCCAGCGGAA |
| 76981 | GGTAGAACGT CGCCGATCCG CCGGCGTGGG GCAGCAGCAC CACCCGTACC GGGGCCTCGG |
| 77041 | GCGTGGGGAA GAACTGCCGC AGCCAGAGTT CCGAGCTCAC CGCACCCCCT CGGCCGCGAC |
| 77101 | CTGGGGAGCC CGGAACCGGG TGATCTCGGC CAAGTGCTTC TCCCGCATCT CCGGGTCGGT |
| 77161 | CACGCCCCAT CCCTCCTCCG GCGCCAGACA GAGGACGCCG ACTTTGCCGT TGTGCACATT |
| 77221 | GCGATGCACA TCGCGCACCG CCGACCCGAC GTCGTCGAGC GGGTAGGTCA CCGACAGCGT |
| 77281 | CGGGTGCACC ATCCCCTTGC AGATCAGGCG GTTCGCCTCC CACGCCTCAC GATAGTTCGC |
| 77341 | GAAGTGGGTA CCGATGATCC GCTTCACGGA CATCCACAGG TACCGATTGT CAAAGGCGTG |
| 77401 | CTCGTATCCC GAGGTTGACG CGCAGGTGAC GATCGTGCCA CCCCGACGTG TCACGTAGAC |
| 77461 | ACTCGCGCCG AACGTCGCGC GCCCCGGGTG CTCGAACACG ATGTCGGGAT CGTCACCGCC |
| 77521 | GGTCAGCTCC CGGATC |

[0073] Those of skill in the art will recognize that, due to the degenerate nature of the genetic code, a variety of DNA compounds differing in their nucleotide sequences can be used to encode a given amino acid sequence of the invention. The native DNA sequence encoding the FK-520 PKS of Streptomyces hygroscopicus is shown herein merely to illustrate a preferred embodiment of the invention, and the present invention includes DNA compounds of any sequence that encode the amino acid sequences of the polypeptides and proteins of the invention. In similar fashion, a polypeptide can typically tolerate one or more amino acid substitutions, deletions, and insertions in its amino acid sequence without loss or significant loss of a desired activity. The present invention includes such polypeptides with alternate amino acid sequences, and the amino acid sequences shown merely illustrate preferred embodiments of the invention.

[0074] The recombinant nucleic acids, proteins, and peptides of the invention are many and diverse. To facilitate an understanding of the invention and the diverse compounds and methods provided thereby, the following general description of the FK-520 PKS genes and modules of the PKS proteins encoded thereby is provided. This general description is followed by a more detailed description of the various domains and modules of the FK-520 PKS contained in and encoded by the compounds of the invention. In this description, reference to a heterologous PKS refers to any PKS other than the FK-520 PKS. Unless otherwise indicated, reference to a PKS includes reference to a portion of a PKS. Moreover, reference to a domain, module, or PKS includes reference to the nucleic acids encoding the same and vice-versa, because the methods and reagents of the invention provide or enable one to prepare proteins and the nucleic acids that encode them.

[0075] The FK-520 PKS is composed of three proteins encoded by three genes designated fkbA, fkbB, and fkbC. The fkbA ORF encodes extender modules 7-10 of the PKS. The fkbB ORF encodes the loading module (the CoA ligase) and extender modules 1-4 of the PKS. The fkbC ORF encodes extender modules 5′-6 of the PKS. The fkbP ORF encodes the NRPS that attaches the pipecolic acid and cyclizes the FK-520 polyketide.

[0076] The loading module of the FK-520 PKS includes a CoA ligase, an ER domain, and an ACP domain. The starter building block or unit for FK-520 is believed to be a dihydroxycyclohexene carboxylic acid, which is derived from shikimate. The recombinant DNA compounds of the invention that encode the loading module of the FK-520 PKS and the corresponding polypeptides encoded thereby are useful for a variety of methods and in a variety of compounds. In one embodiment, a DNA compound comprising a sequence that encodes the FK-520 loading module is inserted into a DNA compound that comprises the coding sequence for a heterologous PKS. The resulting construct, in which the coding sequence for the loading module of the heterologous PKS is replaced by the coding sequence for the FK-520 loading module, provides a novel PKS coding sequence. Examples of heterologous PKS coding sequences include the rapamycin, FK-506, rifamycin, and avermectin PKS coding sequences. In another embodiment, a DNA compound comprising a sequence that encodes the FK-520 loading module is inserted into a DNA compound that comprises the coding sequence for the FK-520 PKS or a recombinant FK-520 PKS that produces an FK-520 derivative.

[0077] In another embodiment, a portion of the loading module coding sequence is utilized in conjunction with a heterologous coding sequence. In this embodiment, the invention provides, for example, either replacing the CoA ligase with a different CoA ligase, deleting the ER, or replacing the ER with a different ER. In addition, or alternatively, the ACP can be replaced by another ACP. In similar fashion, the corresponding domains in another loading or extender module can be replaced by one or more domains of the FK-520 PKS. The resulting heterologous loading module coding sequence can be utilized in conjunction with a coding sequence for a PKS that synthesizes FK-520, an FK-520 derivative, or another polyketide.

[0078] The first extender module of the FK-520 PKS includes a KS domain, an AT domain specific for methylmalonyl CoA, a DH domain, a KR domain, and an ACP domain. The recombinant DNA compounds of the invention that encode the first extender module of the FK-520 PKS and the corresponding polypeptides encoded thereby are useful for a variety of applications. In one embodiment, a DNA compound comprising a sequence that encodes the FK-520 first extender module is inserted into a DNA compound that comprises the coding sequence for a heterologous PKS. The resulting construct, in which the coding sequence for a module of the heterologous PKS is either replaced by that for the first extender module of the FK-520 PKS or the latter is merely added to coding sequences for modules of the heterologous PKS, provides a novel PKS coding sequence. In another embodiment, a DNA compound comprising a sequence that encodes the first extender module of the FK-520 PKS is inserted into a DNA compound that comprises the remainder of the coding sequence for the FK-520 PKS or a recombinant FK-520 PKS that produces an FK-520 derivative.

[0079] In another embodiment, all or only a portion of the first extender module coding sequence is utilized in conjunction with other PKS coding sequences to create a hybrid module. In this embodiment, the invention provides, for example, either replacing the methylmalonyl CoA specific AT with a malonyl CoA, ethylmalonyl CoA, or 2-hydroxymalonyl CoA specific AT; deleting either the DH or KR or both; replacing the DH or KR or both with another DH or KR; and/or inserting an ER. In replacing or inserting KR, DH, and ER domains, it is often beneficial to replace the existing KR, DH, and ER domains with the complete set of domains desired from another module. Thus, if one desires to insert an ER domain, one may simply replace the existing KR and DH domains with a KR, DH, and ER set of domains from a module containing such domains. In addition, the KS and/or ACP can be replaced with another KS and/or ACP. In each of these replacements or insertions, the heterologous KS, AT, DH, KR, ER, or ACP coding sequence can originate from a coding sequence for another module of the FK-520 PKS, from a gene for a PKS that produces a polyketide other than FK-520, or from chemical synthesis. The resulting heterologous first extender module coding sequence can be utilized in conjunction with a coding sequence for a PKS that synthesizes FK-520, an FK-520 derivative, or another polyketide. In similar fashion, the corresponding domains in a module of a heterologous PKS can be replaced by one or more domains of the first extender module of the FK-520 PKS.

[0080] In an illustrative embodiment of this aspect of the invention, the invention provides recombinant PKSs and recombinant DNA compounds and vectors that encode such PKSs in which the KS domain of the first extender module has been inactivated. Such constructs are especially useful when placed in translational reading frame with the remaining modules and domains of an FK-520 or FK-520 derivative PKS. The utility of these constructs is that host cells expressing, or cell free extracts containing, the PKS encoded thereby can be fed or supplied with N-acylcysteamine thioesters of novel precursor molecules to prepare FK-520 derivatives. See U.S. patent application Ser. No. 60/117,384, filed 27 Jan. 1999, and PCT patent publication Nos. US97/02358 and US99/03986, each of which is incorporated herein by reference.

[0081] The second extender module of the FK-520 PKS includes a KS, an AT specific for methylmalonyl CoA, a KR, an inactive DH, and an ACP. The recombinant DNA compounds of the invention that encode the second extender module of the FK-520 PKS and the corresponding polypeptides encoded thereby are useful for a variety of applications. In one embodiment, a DNA compound comprising a sequence that encodes the FK-520 second extender module is inserted into a DNA compound that comprises the coding sequence for a heterologous PKS. The resulting construct, in which the coding sequence for a module of the heterologous PKS is either replaced by that for the second extender module of the FK-520 PKS or the latter is merely added to coding sequences for the modules of the heterologous PKS, provides a novel PKS coding sequence. In another embodiment, a DNA compound comprising a sequence that encodes the second extender module of the FK-520 PKS is inserted into a DNA compound that comprises the coding sequence for the remainder of the FK-520 PKS or a recombinant FK-520 PKS that produces an FK-520 derivative.

[0082] In another embodiment, all or a portion of the second extender module coding sequence is utilized in conjunction with other PKS coding sequences to create a hybrid module. In this embodiment, the invention provides, for example, either replacing the methylmalonyl CoA specific AT with a malonyl CoA, ethylmalonyl CoA, or 2-hydroxymalonyl CoA specific AT; deleting the KR and/or the inactive DH; replacing the KR with another KR; and/or inserting an active DH or an active DH and an ER. In addition, the KS and/or ACP can be replaced with another KS and/or ACP. In each of these replacements or insertions, the heterologous KS, AT, DH, KR, ER, or ACP coding sequence can originate from a coding sequence for another module of the FK-520 PKS, from a coding sequence for a PKS that produces a polyketide other than FK-520, or from chemical synthesis. The resulting heterologous second extender module coding sequence can be utilized in conjunction with a coding sequence from a PKS that synthesizes FK-520, an FK-520 derivative, or another polyketide. In similar fashion, the corresponding domains in a module of a heterologous PKS can be replaced by one or more domains of the second extender module of the FK-520 PKS.

[0083] The third extender module of the FK-520 PKS includes a KS, an AT specific for malonyl CoA, a KR, an inactive DH, and an ACP. The recombinant DNA compounds of the invention that encode the third extender module of the FK-520 PKS and the corresponding polypeptides encoded thereby are useful for a variety of applications. In one embodiment, a DNA compound comprising a sequence that encodes the FK-520 third extender module is inserted into a DNA compound that comprises the coding sequence for a heterologous PKS. The resulting construct, in which the coding sequence for a module of the heterologous PKS is either replaced by that for the third extender module of the FK-520 PKS or the latter is merely added to coding sequences for the modules of the heterologous PKS, provides a novel PKS coding sequence. In another embodiment, a DNA compound comprising a sequence that encodes the third extender module of the FK-520 PKS is inserted into a DNA compound that comprises the coding sequence for the remainder of the FK-520 PKS or a recombinant FK-520 PKS that produces an FK-520 derivative.

[0084] In another embodiment, all or a portion of the third extender module coding sequence is utilized in conjunction with other PKS coding sequences to create a hybrid module. In this embodiment, the invention provides, for example, either replacing the malonyl CoA specific AT with a methylmalonyl CoA, ethylmalonyl CoA, or 2-hydroxymalonyl CoA specific AT; deleting the KR and/or the inactive DH; replacing the KR with another KR; and/or inserting an active DH or an active DH and an ER. In addition, the KS and/or ACP can be replaced with another KS and/or ACP. In each of these replacements or insertions, the heterologous KS, AT, DH, KR, ER, or ACP coding sequence can originate from a coding sequence for another module of the FK-520 PKS, from a coding sequence for a PKS that produces a polyketide other than FK-520, or from chemical synthesis. The resulting heterologous third extender module coding sequence can be utilized in conjunction with a coding sequence from a PKS that synthesizes FK-520, an FK-520 derivative, or another polyketide. In similar fashion, the corresponding domains in a module of a heterologous PKS can be replaced by one or more domains of the third extender module of the FK-520 PKS.

[0085] The fourth extender module of the FK-520 PKS includes a KS, an AT that binds ethylmalonyl CoA, an inactive DH, and an ACP. The recombinant DNA compounds of the invention that encode the fourth extender module of the FK-520 PKS and the corresponding polypeptides encoded thereby are useful for a variety of applications. In one embodiment, a DNA compound comprising a sequence that encodes the FK-520 fourth extender module is inserted into a DNA compound that comprises the coding sequence for a heterologous PKS. The resulting construct, in which the coding sequence for a module of the heterologous PKS is either replaced by that for the fourth extender module of the FK-520 PKS or the latter is merely added to coding sequences for the modules of the heterologous PKS, provides a novel PKS coding sequence. In another embodiment, a DNA compound comprising a sequence that encodes the fourth extender module of the FK-520 PKS is inserted into a DNA compound that comprises the remainder of the coding sequence for the FK-520 PKS or a recombinant FK-520 PKS that produces an FK-520 derivative.

[0086] In another embodiment, a portion of the fourth extender module coding sequence is utilized in conjunction with other PKS coding sequences to create a hybrid module. In this embodiment, the invention provides, for example, either replacing the ethylmalonyl CoA specific AT with a malonyl CoA, methylmalonyl CoA, or 2-hydroxymalonyl CoA specific AT; and/or deleting the inactive DH, inserting a KR, a KR and an active DH, or a KR, an active DH, and an ER. In addition, the KS and/or ACP can be replaced with another KS and/or ACP. In each of these replacements or insertions, the heterologous KS, AT, DH, KR, ER, or ACP coding sequence can originate from a coding sequence for another module of the FK-520 PKS, a PKS for a polyketide other than FK-520, or from chemical synthesis. The resulting heterologous fourth extender module coding sequence can be utilized in conjunction with a coding sequence for a PKS that synthesizes FK-520, an FK-520 derivative, or another polyketide. In similar fashion, the corresponding domains in a module of a heterologous PKS can be replaced by one or more domains of the fourth extender module of the FK-520 PKS.

[0087] As illustrative examples, the present invention provides recombinant genes, vectors, and host cells that result from the conversion of the FK-506 PKS to an FK-520 PKS and vice-versa. In one embodiment, the invention provides a recombinant set of FK-506 PKS genes but in which the coding sequences for the fourth extender module or at least those for the AT domain in the fourth extender module have been replaced by those for the AT domain of the fourth extender module of the FK-520 PKS. This recombinant PKS can be used to produce FK-520 in recombinant host cells. In another embodiment, the invention provides a recombinant set of FK-520 PKS genes but in which the coding sequences for the fourth extender module or at least those for the AT domain in the fourth extender module have been replaced by those for the AT domain of the fourth extender module of the FK-506 PKS. This recombinant PKS can be used to produce FK-506 in recombinant host cells.

[0088] Other examples of hybrid PKS enzymes of the invention include those in which the AT domain of module 4 has been replaced with a malonyl specific AT domain to provide a PKS that produces 21-desethyl-FK520 or with a methylmalonyl specific AT domain to provide a PKS that produces 21-desethyl-21-methyl-FK520. Another hybrid PKS of the invention is prepared by replacing the AT and inactive KR domain of FK-520 extender module 4 with a methylmalonyl specific AT and an active KR domain, such as, for example, from module 2 of the DEBS or oleandolide PKS enzymes, to produce 21-desethyl-21-methyl-22-desoxo-22-hydroxy-FK520. The compounds produced by these hybrid PKS enzymes are neurotrophins.

[0089] The fifth extender module of the FK-520 PKS includes a KS, an AT that binds methylmalonyl CoA, a DH, a KR, and an ACP. The recombinant DNA compounds of the invention that encode the fifth extender module of the FK-520 PKS and the corresponding polypeptides encoded thereby are useful for a variety of applications. In one embodiment, a DNA compound comprising a sequence that encodes the FK-520 fifth extender module is inserted into a DNA compound that comprises the coding sequence for a heterologous PKS. The resulting construct, in which the coding sequence for a module of the heterologous PKS is either replaced by that for the fifth extender module of the FK-520 PKS or the latter is merely added to coding sequences for the modules of the heterologous PKS, provides a novel PKS. In another embodiment, a DNA compound comprising a sequence that encodes the fifth extender module of the FK-520 PKS is inserted into a DNA compound that comprises the coding sequence for the FK-520 PKS or a recombinant FK-520 PKS that produces an FK-520 derivative.

[0090] In another embodiment, a portion of the fifth extender module coding sequence is utilized in conjunction with other PKS coding sequences to create a hybrid module. In this embodiment, the invention provides, for example, either replacing the methylmalonyl CoA specific AT with a malonyl CoA, ethylmalonyl CoA, or 2-hydroxymalonyl CoA specific AT; deleting any one or both of the DH and KR; replacing any one or both of the DH and KR with either a KR and/or DH; and/or inserting an ER. In addition, the KS and/or ACP can be replaced with another KS and/or ACP. In each of these replacements or insertions, the heterologous KS, AT, DH, KR, ER, or ACP coding sequence can originate from a coding sequence for another module of the FK-520 PKS, from a coding sequence for a PKS that produces a polyketide other than FK-520, or from chemical synthesis. The resulting heterologous fifth extender module coding sequence can be utilized in conjunction with a coding sequence for a PKS that synthesizes FK-520, an FK-520 derivative, or another polyketide. In similar fashion, the corresponding domains in a module of a heterologous PKS can be replaced by one or more domains of the fifth extender module of the FK-520 PKS.

[0091] In an illustrative embodiment, the present invention provides a set of recombinant FK-520 PKS genes in which the coding sequences for the DH domain of the fifth extender module have been deleted or mutated to render the DH non-functional. In one such mutated gene, the KR and DH coding sequences are replaced with those encoding only a KR domain from another PKS gene. The resulting PKS genes code for the expression of an FK-520 PKS that produces an FK-520 analog that lacks the C-19 to C-20 double bond of FK-520 and has a C-20 hydroxyl group. Such analogs are preferred neurotrophins, because they have little or no immunosuppressant activity. This recombinant fifth extender module coding sequence can be combined with other coding sequences to make additional compounds of the invention. In an illustrative embodiment, the present invention provides a recombinant FK-520 PKS that contains both this fifth extender module and the recombinant fourth extender module described above that comprises the coding sequence for the fourth extender module AT domain of the FK-506 PKS. The invention also provides recombinant host cells derived from FK-506 producing host cells that have been mutated to prevent production of FK-506 but that express this recombinant PKS and so synthesize the corresponding (lacking the C-19 to C-20 double bond of FK-506 and having a C-20 hydroxyl group) FK-506 derivative. In another embodiment, the present invention provides a recombinant FK-506 PKS in which the DH domain of module 5 has been deleted or otherwise rendered inactive and thus produces this novel polyketide.

[0092] The sixth extender module of the FK-520 PKS includes a KS, an AT specific for methylmalonyl CoA, a KR, a DH, an ER, and an ACP. The recombinant DNA compounds of the invention that encode the sixth extender module of the FK-520 PKS and the corresponding polypeptides encoded thereby are useful for a variety of applications. In one embodiment, a DNA compound comprising a sequence that encodes the FK-520 sixth extender module is inserted into a DNA compound that comprises the coding sequence for a heterologous PKS. The resulting construct, in which the coding sequence for a module of the heterologous PKS is either replaced by that for the sixth extender module of the FK-520 PKS or the latter is merely added to coding sequences for the modules of the heterologous PKS, provides a novel PKS coding sequence. In another embodiment, a DNA compound comprising a sequence that encodes the sixth extender module of the FK-520 PKS is inserted into a DNA compound that comprises the coding sequence for the remainder of the FK-520 PKS or a recombinant FK-520 PKS that produces an FK-520 derivative.

[0093] In another embodiment, a portion of the sixth extender module coding sequence is utilized in conjunction with other PKS coding sequences to create a hybrid module. In this embodiment, the invention provides, for example, either replacing the methylmalonyl CoA specific AT with a malonyl CoA, ethylmalonyl CoA, or 2-hydroxymalonyl CoA specific AT; deleting any one, two, or all three of the KR, DH, and ER; and/or replacing any one, two, or all three of the KR, DH, and ER with another KR, DH, and ER. In addition, the KS and/or ACP can be replaced with another KS and/or ACP. In each of these replacements, the heterologous KS, AT, DH, KR, ER, or ACP coding sequence can originate from a coding sequence for another module of the FK-520 PKS, from a coding sequence for a PKS that produces a polyketide other than FK-520, or from chemical synthesis. The resulting heterologous sixth extender module coding sequence can be utilized in conjunction with a coding sequence for a PKS that synthesizes FK-520, an FK-520 derivative, or another polyketide. In similar fashion, the corresponding domains in a module of a heterologous PKS can be replaced by one or more domains of the sixth extender module of the FK-520 PKS.

[0094] In an illustrative embodiment, the present invention provides a set of recombinant FK-520 PKS genes in which the coding sequences for the DH and ER domains of the sixth extender module have been deleted or mutated to render them non-functional. In one such mutated gene, the KR, ER, and DH coding sequences are replaced with those encoding only a KR domain from another PKS gene. This can also be accomplished by simply replacing the coding sequences for extender module six with those for an extender module having a methylmalonyl specific AT and only a KR domain from a heterologous PKS gene, such as, for example, the coding sequences for extender module two encoded by the eryAI gene. The resulting PKS genes code for the expression of an FK-520 PKS that produces an FK-520 analog that has a C-18 hydroxyl group. Such analogs are preferred neurotrophins, because they have little or no immunosuppressant activity. This recombinant sixth extender module coding sequence can be combined with other coding sequences to make additional compounds of the invention. In an illustrative embodiment, the present invention provides a recombinant FK-520 PKS that contains both this sixth extender module and the recombinant fourth extender module described above that comprises the coding sequence for the fourth extender module AT domain of the FK-506 PKS. The invention also provides recombinant host cells derived from FK-506 producing host cells that have been mutated to prevent production of FK-506 but that express this recombinant PKS and so synthesize the corresponding (having a C-18 hydroxyl group) FK-506 derivative. In another embodiment, the present invention provides a recombinant FK-506 PKS in which the DH and ER domains of module 6 have been deleted or otherwise rendered inactive and thus produces this novel polyketide.

[0095] The seventh extender module of the FK-520 PKS includes a KS, an AT specific for 2-hydroxymalonyl CoA, a KR, a DH, an ER, and an ACP. The recombinant DNA compounds of the invention that encode the seventh extender module of the FK-520 PKS and the corresponding polypeptides encoded thereby are useful for a variety of applications. In one embodiment, a DNA compound comprising a sequence that encodes the FK-520 seventh extender module is inserted into a DNA compound that comprises the coding sequence for a heterologous PKS. The resulting construct, in which the coding sequence for a module of the heterologous PKS is either replaced by that for the seventh extender module of the FK-520 PKS or the latter is merely added to coding sequences for the modules of the heterologous PKS, provides a novel PKS coding sequence. In another embodiment, a DNA compound comprising a sequence that encodes the seventh extender module of the FK-520 PKS is inserted into a DNA compound that comprises the coding sequence for the remainder of the FK-520 PKS or a recombinant FK-520 PKS that produces an FK-520 derivative.

[0096] In another embodiment, a portion or all of the seventh extender module coding sequence is utilized in conjunction with other PKS coding sequences to create a hybrid module. In this embodiment, the invention provides, for example, either replacing the 2-hydroxymalonyl CoA specific AT with a methylmalonyl CoA, ethylmalonyl CoA, or malonyl CoA specific AT; deleting the KR, the DH, and/or the ER; and/or replacing the KR, DH, and/or ER. In addition, the KS and/or ACP can be replaced with another KS and/or ACP. In each of these replacements or insertions, the heterologous KS, AT, DH, KR, ER, or ACP coding sequence can originate from a coding sequence for another module of the FK-520 PKS, from a coding sequence for a PKS that produces a polyketide other than FK-520, or from chemical synthesis. The resulting heterologous seventh extender module coding sequence can be utilized in conjunction with a coding sequence for a PKS that synthesizes FK-520, an FK-520 derivative, or another polyketide. In similar fashion, the corresponding domains in a module of a heterologous PKS can be replaced by one or more domains of the seventh extender module of the FK-520 PKS.

[0097] In an illustrative embodiment, the present invention provides a set of recombinant FK-520 PKS genes in which the coding sequences for the AT domain of the seventh extender module has been replaced with those encoding an AT domain for malonyl, methylmalonyl, or ethylmalonyl CoA from another PKS gene. The resulting PKS genes code for the expression of an FK-520 PKS that produces an FK-520 analog that lacks the C-15 methoxy group, having instead a hydrogen, methyl, or ethyl group at that position, respectively. Such analogs are preferred, because they are more slowly metabolized than FK-520. This recombinant seventh extender module coding sequence can be combined with other coding sequences to make additional compounds of the invention. In an illustrative embodiment, the present invention provides a recombinant FK-520 PKS that contains both this seventh extender module and the recombinant fourth extender module described above that comprises the coding sequence for the fourth extender module AT domain of the FK-506 PKS. The invention also provides recombinant host cells derived from FK-506 producing host cells that have been mutated to prevent production of FK-506 but that express this recombinant PKS and so synthesize the corresponding (C-15-desmethoxy) FK-506 derivative. In another embodiment, the present invention provides a recombinant FK-506 PKS in which the AT domain of module 7 has been replaced and thus produces this novel polyketide.

[0098] In another illustrative embodiment, the present invention provides a hybrid PKS in which the AT and KR domains of module 7 of the FK-520 PKS are replaced by a methylmalonyl specific AT domain and an inactive KR domain, such as, for example, the AT and KR domains of extender module 6 of the rapamycin PKS. The resulting hybrid PKS produces 15-desmethoxy-15-methyl-16-oxo-FK-520, a neurotrophin compound.

[0099] The eighth extender module of the FK-520 PKS includes a KS, an AT specific for 2-hydroxymalonyl CoA, a KR, and an ACP. The recombinant DNA compounds of the invention that encode the eighth extender module of the FK-520 PKS and the corresponding polypeptides encoded thereby are useful for a variety of applications. In one embodiment, a DNA compound comprising a sequence that encodes the FK-520 eighth extender module is inserted into a DNA compound that comprises the coding sequence for a heterologous PKS. The resulting construct, in which the coding sequence for a module of the heterologous PKS is either replaced by that for the eighth extender module of the FK-520 PKS or the latter is merely added to coding sequences for the modules of the heterologous PKS, provides a novel PKS coding sequence. In another embodiment, a DNA compound comprising a sequence that encodes the eighth extender module of the FK-520 PKS is inserted into a DNA compound that comprises the coding sequence for the remainder of the FK-520 PKS or a recombinant FK-520 PKS that produces an FK-520 derivative.

[0100] In another embodiment, a portion of the eighth extender module coding sequence is utilized in conjunction with other PKS coding sequences to create a hybrid module. In this embodiment, the invention provides, for example, either replacing the 2-hydroxymalonyl CoA specific AT with a methylmalonyl CoA, ethylmalonyl CoA, or malonyl CoA specific AT; deleting or replacing the KR; and/or inserting a DH or a DH and an ER. In addition, the KS and/or ACP can be replaced with another KS and/or ACP. In each of these replacements, the heterologous KS, AT, DH, KR, ER, or ACP coding sequence can originate from a coding sequence for another module of the FK-520 PKS, from a coding sequence for a PKS that produces a polyketide other than FK-520, or from chemical synthesis. The resulting heterologous eighth extender module coding sequence can be utilized in conjunction with a PKS that synthesizes FK-520, an FK-520 derivative, or another polyketide. In similar fashion, the corresponding domains in a module of a heterologous PKS can be replaced by one or more domains of the eighth extender module of the FK-520 PKS.

[0101] In an illustrative embodiment, the present invention provides a set of recombinant FK-520 PKS genes in which the coding sequences for the AT domain of the eighth extender module has been replaced with those encoding an AT domain for malonyl, methylmalonyl, or ethylmalonyl CoA from another PKS gene. The resulting PKS genes code for the expression of an FK-520 PKS that produces an FK-520 analog that lacks the C-13 methoxy group, having instead a hydrogen, methyl, or ethyl group at that position, respectively. Such analogs are preferred, because they are more slowly metabolized than FK-520. This recombinant eighth extender module coding sequence can be combined with other coding sequences to make additional compounds of the invention. In an illustrative embodiment, the present invention provides a recombinant FK-520 PKS that contains both this eighth extender module and the recombinant fourth extender module described above that comprises the coding sequence for the fourth extender module AT domain of the FK-506 PKS. The invention also provides recombinant host cells derived from FK-506 producing host cells that have been mutated to prevent production of FK-506 but that express this recombinant PKS and so synthesize the corresponding (C-13-desmethoxy) FK-506 derivative. In another embodiment, the present invention provides a recombinant FK-506 PKS in which the AT domain of module 8 has been replaced and thus produces this novel polyketide.

[0102] The ninth extender module of the FK-520 PKS includes a KS, an AT specific for methylmalonyl CoA, a KR, a DH, an ER, and an ACP. The recombinant DNA compounds of the invention that encode the ninth extender module of the FK-520 PKS and the corresponding polypeptides encoded thereby are useful for a variety of applications. In one embodiment, a DNA compound comprising a sequence that encodes the FK-520 ninth extender module is inserted into a DNA compound that comprises the coding sequence for a heterologous PKS. The resulting construct, in which the coding sequence for a module of the heterologous PKS is either replaced by that for the ninth extender module of the FK-520 PKS or the latter is merely added to coding sequences for the modules of the heterologous PKS, provides a novel PKS coding sequence. In another embodiment, a DNA compound comprising a sequence that encodes the ninth extender module of the FK-520 PKS is inserted into a DNA compound that comprises the coding sequence for the remainder of the FK-520 PKS or a recombinant FK-520 PKS that produces an FK-520 derivative.

[0103] In another embodiment, a portion of the ninth extender module coding sequence is utilized in conjunction with other PKS coding sequences to create a hybrid module. In this embodiment, the invention provides, for example, either replacing the methylmalonyl CoA specific AT with a malonyl CoA, ethylmalonyl CoA, or 2-hydroxymalonyl CoA specific AT; deleting any one, two, or all three of the KR, DH, and ER; and/or replacing any one, two, or all three of the KR, DH, and ER with another KR, DH, and/or ER. In addition, the KS and/or ACP can be replaced with another KS and/or ACP. In each of these replacements, the heterologous KS, AT, DH, KR, ER, or ACP coding sequence can originate from a coding sequence for another module of the FK-520 PKS, from a coding sequence for a PKS that produces a polyketide other than FK-520, or from chemical synthesis. The resulting heterologous ninth extender module coding sequence can be utilized in conjunction with a PKS that synthesizes FK-520, an FK-520 derivative, or another polyketide. In similar fashion, the corresponding domains in a module of a heterologous PKS can be replaced by one or more domains of the ninth extender module of the FK-520 PKS.

[0104] The tenth extender module of the FK-520 PKS includes a KS, an AT specific for malonyl CoA, and an ACP. The recombinant DNA compounds of the invention that encode the tenth extender module of the FK-520 PKS and the corresponding polypeptides encoded thereby are useful for a variety of applications. In one embodiment, a DNA compound comprising a sequence that encodes the FK-520 tenth extender module is inserted into a DNA compound that comprises the coding sequence for a heterologous PKS. The resulting construct, in which the coding sequence for a module of the heterologous PKS is either replaced by that for the tenth extender module of the FK-520 PKS or the latter is merely added to coding sequences for the modules of the heterologous PKS, provides a novel PKS coding sequence. In another embodiment, a DNA compound comprising a sequence that encodes the tenth extender module of the FK-520 PKS is inserted into a DNA compound that comprises the coding sequence for the remainder of the FK-520 PKS or a recombinant FK-520 PKS that produces an FK-520 derivative.

[0105] In another embodiment, a portion or all of the tenth extender module coding sequence is utilized in conjunction with other PKS coding sequences to create a hybrid module. In this embodiment, the invention provides, for example, either replacing the malonyl CoA specific AT with a methylmalonyl CoA, ethylmalonyl CoA, or 2-hydroxymalonyl CoA specific AT; and/or inserting a KR, a KR and DH, or a KR, DH, and an ER. In addition, the KS and/or ACP can be replaced with another KS and/or ACP. In each of these replacements or insertions, the heterologous KS, AT, DH, KR, ER, or ACP coding sequence can originate from a coding sequence for another module of the FK-520 PKS, from a coding sequence for a PKS that produces a polyketide other than FK-520, or from chemical synthesis. The resulting heterologous tenth extender module coding sequence can be utilized in conjunction with a coding sequence for a PKS that synthesizes FK-520, an FK-520 derivative, or another polyketide. In similar fashion, the corresponding domains in a module of a heterologous PKS can be replaced by one or more domains of the tenth extender module of the FK-520 PKS.

[0106] The FK-520 polyketide precursor produced by the action of the tenth extender module of the PKS is then attached to pipecolic acid and cyclized to form FK-520. The enzyme FkbP is the NRPS like enzyme that catalyzes these reactions. FkbP also includes a thioesterase activity that cleaves the nascent FK-520 polyketide from the NRPS. The present invention provides recombinant DNA compounds that encode the fkbP gene and so provides recombinant methods for expressing the fkbP gene product in recombinant host cells. The recombinant fkbP genes of the invention include those in which the coding sequence for the adenylation domain has been mutated or replaced with coding sequences from other NRPS like enzymes so that the resulting recombinant FkbP incorporates a moiety other than pipecolic acid. For the construction of host cells that do not naturally produce pipecolic acid, the present invention provides recombinant DNA compounds that express the enzymes that catalyze at least some of the biosynthesis of pipecolic acid (see Nielsen et al., 1991, Biochem. 30: 5789-96). The fkbL gene encodes a homolog of RapL, a lysine cyclodeaminase responsible in part for producing the pipecolate unit added to the end of the polyketide chain. The fkbB and fkbL recombinant genes of the invention can be used in heterologous hosts to produce compounds such as FK-520 or, in conjunction with other PKS or NRPS genes, to produce known or novel polyketides and non-ribosmal peptides.

[0107] The present invention also provides recombinant DNA compounds that encode the P450 oxidase and methyltransferase genes involved in the biosynthesis of FK-520. FIG. 2 shows the various sites on the FK-520 polyketide core structure at which these enzymes act. By providing these genes in recombinant form, the present invention provides recombinant host cells that can produce FK-520. This is accomplished by introducing the recombinant PKS, P450 oxidase, and methyltransferase genes into a heterologous host cell. In a preferred embodiment, the heterologous host cell is Streptomyces coelicolor CH999 or Streptomyces lividans K4-114, as described in U.S. Pat. No. 5,830,750 and U.S. patent application Ser. No. 08/828,898, filed 31 Mar. 1997, and 09/181,833, filed 28 Oct. 1998, each of which is incorporated herein by reference. In addition, by providing recombinant host cells that express only a subset of these genes, the present invention provides methods for making FK-520 precursor compounds not readily obtainable by other means.

[0108] In a related aspect, the present invention provides recombinant DNA compounds and vectors that are useful in generating, by homologous recombination, recombinant host cells that produce FK-520 precursor compounds. In this aspect of the invention, a native host cell that produces FK-520 is transformed with a vector (such as an SCP2* derived vector for Streptomyces host cells) that encodes one or more disrupted genes (i.e., a hydroxylase, a methyltransferase, or both) or merely flanking regions from those genes. When the vector integrates by homologous recombination, the native, functional gene is deleted or replaced by the non-functional recombinant gene, and the resulting host cell thus produces an FK-520 precursor. Such host cells can also be complemented by introduction of a modified form of the deleted or mutated non-functional gene to produce a novel compound.

[0109] In one important embodiment, the present invention provides a hybrid PKS and the corresponding recombinant DNA compounds that encode those hybrid PKS enzymes. For purposes of the present invention a hybrid PKS is a recombinant PKS that comprises all or part of one or more modules and thioesterase/cyclase domain of a first PKS and all or part of one or more modules, loading module, and thioesterase/cyclase domain of a second PKS. In one preferred embodiment, the first PKS is all or part of the FK-520 PKS, and the second PKS is only a portion or all of a non-FK-520 PKS.

[0110] One example of the preferred embodiment is an FK-520 PKS in which the AT domain of module 8, which specifies a hydroxymalonyl CoA and from which the C-13 methoxy group of FK-520 is derived, is replaced by an AT domain that specifies a malonyl, methylmalonyl, or ethylmalonyl CoA. Examples of such replacement AT domains include the AT domains from modules 3, 12, and 13 of the rapaymycin PKS and from modules 1 and 2 of the erythromycin PKS. Such replacements, conducted at the level of the gene for the PKS, are illustrated in the examples below. Another illustrative example of such a hybrid PKS includes an FK-520 PKS in which the natural loading module has been replaced with a loading module of another PKS. Another example of such a hybrid PKS is an FK-520 PKS in which the AT domain of module three is replaced with an AT domain that binds methylmalonyl CoA.

[0111] In another preferred embodiment, the first PKS is most but not all of a non-FK-520 PKS, and the second PKS is only a portion or all of the FK-520 PKS. An illustrative example of such a hybrid PKS includes an erythromycin PKS in which an AT specific for methylmalonyl CoA is replaced with an AT from the FK-520 PKS specific for malonyl CoA.

[0112] Those of skill in the art will recognize that all or part of either the first or second PKS in a hybrid PKS of the invention need not be isolated from a naturally occurring source. For example, only a small portion of an AT domain determines its specificity. See U.S. provisional patent application Ser. No. 60/091,526, incorporated herein by reference. The state of the art in DNA synthesis allows the artisan to construct de novo DNA compounds of size sufficient to construct a useful portion of a PKS module or domain. For purposes of the present invention, such synthetic DNA compounds are deemed to be a portion of a PKS.

[0113] Thus, the hybrid modules of the invention are incorporated into a PKS to provide a hybrid PKS of the invention. A hybrid PKS of the invention can result not only:

[0114] (i) from fusions of heterologous domain (where heterologous means the domains in that module are from at least two different naturally occurring modules) coding sequences to produce a hybrid module coding sequence contained in a PKS gene whose product is incorporated into a PKS,

[0115] but also:

[0116] (ii) from fusions of heterologous module (where heterologous module means two modules are adjacent to one another that are not adjacent to one another in naturally occurring PKS enzymes) coding sequences to produce a hybrid coding sequence contained in a PKS gene whose product is incorporated into a PKS,

[0117] (iii) from expression of one or more FK-520 PKS genes with one or more non-FK-520 PKS genes, including both naturally occurring and recombinant non-FK-520 PKS genes, and

[0118] (iv) from combinations of the foregoing.

[0119] Various hybrid PKSs of the invention illustrating these various alternatives are described herein.

[0120] Examples of the production of a hybrid PKS by co-expression of PKS genes from the FK-520 PKS and another non-FK-520 PKS include hybrid PKS enzymes produced by coexpression of FK-520 and rapamycin PKS genes. Preferably, such hybrid PKS enzymes are produced in recombinant Streptomyces host cells that produce FK-520 or FK-506 but have been mutated to inactivate the gene whose function is to be replaced by the rapamycin PKS gene introduced to produce the hybrid PKS. Particular examples include (i) replacement of the fkbC gene with the rapB gene; and (ii) replacement of the fkbA gene with the rapC gene. The latter hybrid PKS produces 13,15-didesmethoxy-FK-520, if the host cell is an FK-520 producing host cell, and 13,15-didesmethoxy-FK-506, if the host cell is an FK-506 producing host cell. The compounds produced by these hybrid PKS enzymes are immunosuppressants and neurotrophins but can be readily modified to act only as neurotrophins, as described in Example 6, below.

[0121] Other illustrative hybrid PKS enzymes of the invention are prepared by replacing the fkbA gene of an FK-520 or FK-506 producing host cell with a hybrid fkbA gene in which: (a) the extender module 8 through 10, inclusive, coding sequences have been replaced by the coding sequences for extender modules 12 to 14, inclusive, of the rapamycin PKS; and (b) the module 8 coding sequences have been replaced by the module 8 coding sequence of the rifamycin PKS. When expressed with the other, naturally occurring FK-520 or FK-506 PKS genes and the genes of the modification enzymes, the resulting hybrid PKS enzymes produce, respectively, (a) 13-desmethoxy-FK-520 or 13-desmethoxy-FK-506; and (b) 13-desmethoxy-13-methyl-FK-520 or 13-desmethoxy-13-methyl-FK-506. In a preferred embodiment, these recombinant PKS genes of the invention are introduced into the producing host cell by a vector such as pHU204, which is a plasmid pRM5 derivative that has the well-characterized SCP2* replicon, the colE1 replicon, the tsr and bla resistance genes, and a cos site. This vector can be used to introduce the recombinant fkbA replacement gene in an FK-520 or FK-506 producing host cell (or a host cell derived therefrom in which the endogenous fkbA gene has either been rendered inactive by mutation, deletion or homologous recombination with the gene that replaces it) to produce the desired hybrid PKS.

[0122] In constructing hybrid PKSs of the invention, certain general methods may be helpful. For example, it is often beneficial to retain the framework of the module to be altered to make the hybrid PKS. Thus, if one desires to add DH and ER functionalities to a module, it is often preferred to replace the KR domain of the original module with a KR, DH, and ER domain-containing segment from another module, instead of merely inserting DH and ER domains. One can alter the stereochemical specificity of a module by replacement of the KS domain with a KS domain from a module that specifies a different stereochemistry. See Lau et al., 1999, “Dissecting the role of acyltransferase domains of modular polyketide synthases in the choice and stereochemical fate of extender units,” Biochemistry 38(5):1643-1651, incorporated herein by reference. Stereochemistry can also be changed by changing the KR domain. Also, one can alter the specificity of an AT domain by changing only a small segment of the domain. See Lau et al., supra. One can also take advantage of known linker regions in PKS proteins to link modules from two different PKSs to create a hybrid PKS. See Gokhale et al., 16 Apr. 1999, “Dissecting and Exploiting Intermodular Communication in Polyketide Synthases,” Science 284: 482-485, incorporated herein by reference.

[0123] The following Table lists references describing illustrative PKS genes and corresponding enzymes that can be utilized in the construction of the recombinant PKSs and the corresponding DNA compounds that encode them of the invention. Also presented are various references describing tailoring enzymes and corresponding genes that can be employed in accordance with the methods of the present invention.

### Avermectin

[0124] U.S. Pat. No. 5,252,474 to Merck.
[0125] MacNeil et al., 1993, Industrial Microorganisms: Basic and Applied Molecular Genetics, Baltz, Hegeman, & Skatrud, eds. (ASM), pp. 245-256, A Comparison of the Genes Encoding the Polyketide Synthases for Avermectin, Erythromycin, and Nemadectin.
[0126] MacNeil et al., 1992, Gene 115: 119-125, Complex Organization of the Streptomyces avermitilis genes encoding the avermectin polyketide synthase.
[0127] Ikeda et al., August 1999, Organization of the biosynthetic gene cluster for the polyketide anthelmintic macrolide avermectin in Streptomyces avermitilis, Proc. Natl. Acad. Sci. USA 96: 9509-9514.

### Candicidin (FR008)

[0128] Hu et al., 1994, Mol. Microbiol. 14:163-172.

### Epothilone

[0129] U.S. Pat. App. Ser. No. 60/130,560, filed 22 Apr. 1999.

### Erythromycin

[0130] PCT Pub. No. 93/13663 to Abbott.
[0131] U.S. Pat. No. 5,824,513 to Abbott.
[0132] Donadio et al., 1991, Science 252:675-9.
[0133] Cortes et al., 8 Nov. 1990, Nature 348:176-8, An unusually large multifunctional polypeptide in the erythromycin producing polyketide synthase of Saccharopolyspora erythraea.

[0134] Glycosylation Enzymes
[0135] PCT Pat. App. Pub. No. 97/23630 to Abbott.

### FK-506

[0136] Motamedi et al., 1998, The biosynthetic gene cluster for the macrolactone ring of the immunosuppressant FK-506, Eur. J. biochem. 256: 528-534.
[0137] Motamedi et al., 1997, Structural organization of a multifunctional polyketide synthase involved in the biosynthesis of the macrolide immunosuppressant FK-506, Eur. J. Biochem. 244: 74-80.

[0138] Methyltransferase
[0139] U.S. Pat. No. 5,264,355, issued 23 Nov. 1993, Methylating enzyme from Streptomyces MA6858. 31-O-desmethyl-FK-506 methyltransferase.
[0140] Motamedi et al., 1996, Characterization of methyltransferase and hydroxylase genes involved in the biosynthesis of the immunosuppressants FK-506 and FK-520, J. Bacteriol. 178: 5243-5248.
   Streptomyces hygroscopicus
[0141] U.S. patent application Ser. No. 09/154,083, filed 16 Sep. 1998.

### Lovastatin

[0142] U.S. Pat. No. 5,744,350 to Merck.

### Narbomycin

[0143] U.S. patent application Ser. No. 60/107,093, filed 5 Nov. 1998, and Ser. No. 60/120,254, filed 16 Feb. 1999.

### Nemadectin

[0144] MacNeil et al, 1993, supra.

### Niddamycin

[0145] Kakavas et al., 1997, Identification and characterization of the niddamycin polyketide synthase genes from Streptomyces caelestis, J. Bacteriol. 179: 7515-7522.

### Oleandomycin

[0146] Swan et al., 1994, Characterisation of a Streptomyces antibioticus gene encoding a type I polyketide synthase which has an unusual coding sequence, Mol. Gen. Genet. 242: 358-362.
[0147] U.S. patent application Ser. No. 60/120,254, filed 16 Feb. 1999.
[0148] Olano et al., 1998, Analysis of a Streptomyces antibioticus chromosomal region involved in oleandomycin biosynthesis, which encodes two glycosyltransferases responsible for glycosylation of the macrolactone ring, Mol. Gen. Genet. 259(3): 299-308.

### Picromycin

[0149] PCT patent application US99/15047, filed 2 Jul. 1999.
[0150] Xue et al., 1998, Hydroxylation of macrolactones YC-17 and narbomycin is mediated by the pikC-encoded cytochrome P450 in Streptomyces venezuelae, Chemistry & Biology 5(11): 661-667.
[0151] Xue et al., October 1998, A gene cluster for macrolide antibiotic biosynthesis in Streptomyces venezuelae: Architecture of metabolic diversity, Proc. Natl. Acad. Sci. USA 95: 12111 12116.

### Platenolide

[0152] EP Pat. App. Pub. No. 791,656 to Lilly.

### Rapamycin

[0153] Schwecke et al., August 1995, The biosynthetic gene cluster for the polyketide rapamycin, Proc. Natl. Acad. Sci. USA 92:7839-7843.
[0154] Aparicio et al., 1996, Organization of the biosynthetic gene cluster for rapamycin in Streptomyces hygroscopicus: analysis of the enzymatic domains in the modular polyketide synthase, Gene 169: 9-16.

### Rifamycin

[0155] August et al., 13 Feb. 1998, Biosynthesis of the ansamycin antibiotic rifamycin: deductions from the molecular analysis of the rifbiosynthetic gene cluster of Amycolatopsis mediterranei S669, Chemistry & Biology, 5(2): 69-79.

### Sorangium PKS

[0156] U.S. patent application Ser. No. 09/144,085, filed 31 Aug. 1998.

### Soraphen

[0157] U.S. Pat. No. 5,716,849 to Novartis.
[0158] Schupp et al., 1995, J Bacteriology 177: 3673-3679. A Sorangium cellulosum (Myxobacterium) Gene Cluster for the Biosynthesis of the Macrolide Antibiotic Soraphen A: Cloning, Characterization, and Homology to Polyketide Synthase Genes from Actinomycetes.

### Spiramycin

[0159] U.S. Pat. No. 5,098,837 to Lilly.

[0160] Activator Gene
[0161] U.S. Pat. No. 5,514,544 to Lilly.

### Tylosin

[0162] EP Pub. No. 791,655 to Lilly.
[0163] U.S. Pat. No. 5,876,991 to Lilly.
[0164] Kuhstoss et al., 1996, Gene 183:231-6., Production of a novel polyketide through the construction of a hybrid polyketide synthase.

[0165] Tailoring Enzymes

[0166] Merson-Davies and Cundliffe, 1994, Mol. Microbiol. 13: 349-355. Analysis of five tylosin biosynthetic genes from the tylBA region of the Streptomyces fradiae genome.

[0167] As the above Table illustrates, there are a wide variety of polyketide synthase genes that serve as readily available sources of DNA and sequence information for use in constructing the hybrid PKS-encoding DNA compounds of the invention. Methods for constructing hybrid PKS-encoding DNA compounds are described without reference to the FK-520 PKS in PCT patent publication No. 98/51695; U.S. Pat. Nos. 5,672,491 and 5,712,146 and U.S. patent application Ser. No. 09/073,538, filed 6 May 1998, and 09/141,908, filed 28 Aug. 1998, each of which is incorporated herein by reference.

[0168] The hybrid PKS-encoding DNA compounds of the invention can be and often are hybrids of more than two PKS genes. Moreover, there are often two or more modules in the hybrid PKS in which all or part of the module is derived from a second (or third) PKS. Thus, as one illustrative example, the present invention provides a hybrid FK-520 PKS that contains the naturally occurring loading module and FkbP as well as modules one, two, four, six, seven, and eight, nine, and ten of the FK-520 PKS and further contains hybrid or heterologous modules three and five. Hybrid or heterologous module three contains an AT domain that is specific of methylmalonyl CoA and can be derived for example, from the erythromycin or rapamycin PKS genes. Hybrid or heterologous module five contains an AT domain that is specific for malonyl CoA and can be derived for example, from the picromycin or rapamycin PKS genes.

[0169] While an important embodiment of the present invention relates to hybrid PKS enzymes and corresponding genes, the present invention also provides recombinant FK-520 PKS genes in which there is no second PKS gene sequence present but which differ from the FK-520 PKS gene by one or more deletions. The deletions can encompass one or more modules and/or can be limited to a partial deletion within one or more modules. When a deletion encompasses an entire module, the resulting FK-520 derivative is at least two carbons shorter than the gene from which it was derived. When a deletion is within a module, the deletion typically encompasses a KR, DH, or ER domain, or both DH and ER domains, or both KR and DH domains, or all three KR, DH, and ER domains.

[0170] To construct a hybrid PKS or FK-520 derivative PKS gene of the invention, one can employ a technique, described in PCT Pub. No. 98/27203 and U.S. patent application Ser. No. 08/989,332, filed 11 Dec. 1997, now U.S. Pat. No. 6,033,883, each of which is incorporated herein by reference, in which the large PKS gene is divided into two or more, typically three, segments, and each segment is placed on a separate expression vector. In this manner, each of the segments of the gene can be altered, and various altered segments can be combined in a single host cell to provide a recombinant PKS gene of the invention. This technique makes more efficient the construction of large libraries of recombinant PKS genes, vectors for expressing those genes, and host cells comprising those vectors.

[0171] Thus, in one important embodiment, the recombinant DNA compounds of the invention are expression vectors. As used herein, the term expression vector refers to any nucleic acid that can be introduced into a host cell or cell-free transcription and translation medium. An expression vector can be maintained stably or transiently in a cell, whether as part of the chromosomal or other DNA in the cell or in any cellular compartment, such as a replicating vector in the cytoplasm. An expression vector also comprises a gene that serves to produce RNA that is translated into a polypeptide in the cell or cell extract. Furthermore, expression vectors typically contain additional functional elements, such as resistance-conferring genes to act as selectable markers.

[0172] The various components of an expression vector can vary widely, depending on the intended use of the vector. In particular, the components depend on the host cell(s) in which the vector will be used or is intended to function. Vector components for expression and maintenance of vectors in E. coli are widely known and commercially available, as are vector components for other commonly used organisms, such as yeast cells and Streptomyces cells.

[0173] In a preferred embodiment, the expression vectors of the invention are used to construct recombinant Streptomyces host cells that express a recombinant PKS of the invention. Preferred Streptomyces host cell/vector combinations of the invention include S. coelicolor CH999 and S. lividans K4-114 host cells, which do not produce actinorhodin, and expression vectors derived from the pRM1 and pRM5 vectors, as described in U.S. Pat. No. 5,830,750 and U.S. patent application Ser. No. 08/828,898, filed 31 Mar. 1997, and 09/181,833, filed 28 Oct. 1998, each of which is incorporated herein by reference.

[0174] The present invention provides a wide variety of expression vectors for use in Streptomyces. For replicating vectors, the origin of replication can be, for example and without limitation, a low copy number vector, such as SCP2* (see Hopwood et al., Genetic Manipulation of Streptomyces: A Laboratory manual (The John Innes Foundation, Norwich, U.K., 1985); Lydiate et al., 1985, Gene 35: 223-235; and Kieser and Melton, 1988, Gene 65: 83-91, each of which is incorporated herein by reference), SLP1.2 (Thompson et al., 1982, Gene 20: 51-62, incorporated herein by reference), and SG5(ts) (Muth et al., 1989, Mol. Gen. Genet. 219: 341-348, and Bierman et al., 1992, Gene 116: 43-49, each of which is incorporated herein by reference), or a high copy number vector, such as pIJ101 and pJV1 (see Katz et al., 1983, J. Gen. Microbiol. 129: 2703-2714; Vara et al., 1989, J. Bacteriol. 171: 5782-5781; and Servin-Gonzalez, 1993, Plasmid 30: 131-140, each of which is incorporated herein by reference). Generally, however, high copy number vectors are not preferred for expression of genes contained on large segments of DNA. For non-replicating and integrating vectors, it is useful to include at least an E. coli origin of replication, such as from pUC, p1P, p1I, and pBR. For phage based vectors, the phages phiC31 and KC515 can be employed (see Hopwood et al., supra).

[0175] Typically, the expression vector will comprise one or more marker genes by which host cells containing the vector can be identified and/or selected. Useful antibiotic resistance conferring genes for use in Streptomyces host cells include the ermE (confers resistance to erythromycin and other macrolides and lincomycin), tsr (confers resistance to thiostrepton), aadA (confers resistance to spectinomycin and streptomycin), aacC4 (confers resistance to apramycin, kanamycin, gentamicin, geneticin (G418), and neomycin), hyg (confers resistance to hygromycin), and vph (confers resistance to viomycin) resistance conferring genes.

[0176] The recombinant PKS gene on the vector will be under the control of a promoter, typically with an attendant ribosome binding site sequence. The present invention provides the endogenous promoters of the FK-520 PKS and related biosynthetic genes in recombinant form, and these promoters are preferred for use in the native hosts and in heterologous hosts in which the promoters function. A preferred promoter of the invention is the fkbO gene promoter, comprised in a sequence of about 270 bp between the start of the open reading frames of the fkbO and fkbB genes. The fkbO promoter is believed to be bi-directional in that it promotes transcription of the genes fkbO, fkbP, and fkbA in one direction and fkbB, fkbC, and fkbL in the other. Thus, in one aspect, the present invention provides a recombinant expression vector comprising the promoter of the fkbO gene of an FK-520 producing organism positioned to transcribe a gene other than fkbO. In a preferred embodiment the transcribed gene is an FK-520 PKS gene. In another preferred embodiment, the transcribed gene is a gene that encodes a protein comprised in a hybrid PKS.

[0177] Heterologous promoters can also be employed and are preferred for use in host cells in which the endogenous FK-520 PKS gene promoters do not function or function poorly. A preferred heterologous promoter is the actI promoter and its attendant activator gene actII-ORF4, which is provided in the pRM1 and pRM5 expression vectors, supra. This promoter is activated in the stationary phase of growth when secondary metabolites are normally synthesized. Other useful Streptomyces promoters include without limitation those from the ermE gene and the melC1 gene, which act constitutively, and the tipA gene and the merA gene, which can be induced at any growth stage. In addition, the T7 RNA polymerase system has been transferred to Streptomyces and can be employed in the vectors and host cells of the invention. In this system, the coding sequence for the T7 RNA polymerase is inserted into a neutral site of the chromosome or in a vector under the control of the inducible merA promoter, and the gene of interest is placed under the control of the T7 promoter. As noted above, one or more activator genes can also be employed to enhance the activity of a promoter. Activator genes in addition to the actII-ORF4 gene discussed above include dnrI, redD, and ptpA genes (see U.S. patent application Ser. No. 09/181,833, supra) to activate promoters under their control.

[0178] In addition to providing recombinant DNA compounds that encode the FK-520 PKS, the present invention also provides DNA compounds that encode the ethylmalonyl CoA and 2-hydroxymalonyl CoA utilized in the synthesis of FK-520. Thus, the present invention also provides recombinant host cells that express the genes required for the biosynthesis of ethylmalonyl CoA and 2-hydroxymalonyl CoA. FIGS. 3 and 4 show the location of these genes on the cosmids of the invention and the biosynthetic pathway that produces ethylmalonyl CoA.

[0179] For 2-hydroxymalonyl CoA biosynthesis, the fkbH, fkbI, fkbJ, and fkbK genes are sufficient to confer this ability on Streptomyces host cells. For conversion of 2-hydroxymalonyl to 2-methoxymalonyl, the fkbG gene is also employed. While the complete coding sequence for fkbH is provided on the cosmids of the invention, the sequence for this gene provided herein may be missing a T residue, based on a comparison made with a similar gene cloned from the ansamitocin gene cluster by Dr. H. Floss. Where the sequence herein shows one T, there may be two, resulting in an extension of the fkbH reading frame to encode the amino acid sequence (SEQ ID NO:2):

MTIVKCLVWDLDNTLWRGTVLEDDEVVLTDEIREVITTLDDRGILQAVAS
KNDHDLAWERLERLGVAEYFVLARIGWGPKSQSVREIATELNFAPTTIAF
IDDQPAERAEVAFHLPEVRCYPAEQAATLLSLPEFSPPVSTVDSRRRRLM
YQAGFARDQAREAYSGPDEDFLRSLDLSMTIAPAGEEELSRVEELTLRTS
QMNATGVHYSDADLRALLTDPAHEVLVVTMGDRFGPHGAVGIILLEKKPS
TWHLKLLATSCRVVSFGAGATILNWLTDQGARAGAHLVADFRRTDRNRMM
EIAYRFAGFADSDCPCVSEVAGASAAGVERLHLEPSARPAPTFJTLTLTA
ADIAPVTVSAAG.

[0180] For ethylmalonyl CoA biosynthesis, one requires only a crotonyl CoA reductase, which can be supplied by the host cell but can also be supplied by recombinant expression of the fkbS gene of the present invention. To increase yield of ethylmalonyl CoA, one can also express the fkbE and fkbU genes as well. While such production can be achieved using only the recombinant genes above, one can also achieve such production by placing into the recombinant host cell a large segment of the DNA provided by the cosmids of the invention. Thus, for 2-hydroxymalonyl and 2-methoxymalonyl CoA biosynthesis, one can simply provide the cells with the segment of DNA located on the left side of the FK-520 PKS genes shown in FIG. 1. For ethylmalonyl CoA biosynthesis, one can simply provide the cells with the segment of DNA located on the right side of the FK-520 PKS genes shown in FIG. 1 or, alternatively, both the right and left segments of DNA.

[0181] The recombinant DNA expression vectors that encode these genes can be used to construct recombinant host cells that can make these important polyketide building blocks from cells that otherwise are unable to produce them. For example, Streptomyces coelicolor and Streptomyces lividans do not synthesize ethylmalonyl CoA or 2-hydroxymalonyl CoA. The invention provides methods and vectors for constructing recombinant Streptomyces coelicolor and Streptomyces lividans that are able to synthesize either or both ethylmalonyl CoA and 2-hydroxymalonyl CoA. These host cells are thus able to make polyketides, those requiring these substrates, that cannot otherwise be made in such cells.

[0182] In a preferred embodiment, the present invention provides recombinant Streptomyces host cells, such as S. coelicolor and S. lividans, that have been transformed with a recombinant vector of the invention that codes for the expression of the ethylmalonyl CoA biosynthetic genes. The resulting host cells produce ethylmalonyl CoA and so are preferred host cells for the production of polyketides produced by PKS enzymes that comprise one or more AT domains specific for ethylmalonyl CoA. Illustrative PKS enzymes of this type include the FK-520 PKS and a recombinant PKS in which one or more AT domains is specific for ethylmalonyl CoA.

[0183] In a related embodiment, the present invention provides Streptomyces host cells in which one or more of the ethylmalonyl or 2-hydroxymalonyl biosynthetic genes have been deleted by homologous recombination or rendered inactive by mutation. For example, deletion or inactivation of the fkbG gene can prevent formation of the methoxyl groups at C-13 and C-15 of FK-520 (or, in the corresponding FK-506 producing cell, FK-506), leading to the production of 13,15-didesmethoxy-13,15-dihydroxy-FK-520 (or, in the corresponding FK-506 producing cell, 13,15-didesmethoxy-13,15-dihydroxy-FK-506). If the fkbG gene product acts on 2-hydroxymalonyl and the resulting 2-methoxymalonyl substrate is required for incorporation by the PKS, the AT domains of modules 7 and 8 may bind malonyl CoA and methylmalonyl CoA. Such incorporation results in the production of a mixture of polyketides in which the methoxy groups at C-13 and C-15 of FK-520 (or FK-506) are replaced by either hydrogen or methyl.

[0184] This possibility of non-specific binding results from the construction of a hybrid PKS of the invention in which the AT domain of module 8 of the FK-520 PKS replaced the AT domain of module 6 of DEBS. The resulting PKS produced, in Streptomyces lividans, 6-dEB and 2-desmethyl-6-dEB, indicating that the AT domain of module 8 of the FK-520 PKS could bind malonyl CoA and methylmalonyl CoA substrates. Thus, one could possibly also prepare the 13,15-didesmethoxy-FK-520 and corresponding FK-506 compounds of the invention by deleting or otherwise inactivating one or more or all of the genes required for 2-hydroxymalonyl CoA biosynthesis, i.e., the fkbH, fkbI, fkbJ, and fkbK genes. In any event, the deletion or inactivation of one or more biosynthetic genes required for ethylmalonyl and/or 2-hydroxymalonyl production prevents the formation of polyketides requiring ethylmalonyl and/or 2-hydroxymalonyl for biosynthesis, and the resulting host cells are thus preferred for production of polyketides that do not require the same.

[0185] The host cells of the invention can be grown and fermented under conditions known in the art for other purposes to produce the compounds of the invention. See, e.g., U.S. Pat. Nos. 5,194,378; 5,116,756; and 5,494,820, incorporated herein by reference, for suitable fermentation processes. The compounds of the invention can be isolated from the fermentation broths of these cultured cells and purified by standard procedures. Preferred compounds of the invention include the following compounds: 13-desmethoxy-FK-506; 13-desmethoxy-FK-520; 13,15-didesmethoxy-FK-506; 13,15-didesmethoxy-FK-520; 13-desmethoxy-18-hydroxy-FK-506; 13-desmethoxy-18-hydroxy-FK-520; 13,15-didesmethoxy-18-hydroxy-FK-506; and 13,15-didesmethoxy-18-hydroxy-FK-520. These compounds can be further modified as described for tacrolimus and FK-520 in U.S. Pat. Nos. 5,225,403; 5,189,042; 5,164,495; 5,068,323; 4,980,466; and 4,920,218, incorporated herein by reference.

[0186] Other compounds of the invention are shown in FIG. 8, Parts A and B. In FIG. 8, Part A, illustrative C-32-substituted compounds of the invention are shown in two columns under the heading R. The substituted compounds are preferred for topical administration and are applied to the dermis for treatment of conditions such as psoriasis. In FIG. 8, Part B, illustrative reaction schemes for making the compounds shown in FIG. 8, Part A, are provided. In the upper scheme in FIG. 8, Part B, the C-32 substitution is a tetrazole moiety, illustrative of the groups shown in the left column under R in FIG. 8, Part A. In the lower scheme in FIG. 8, Part B, the C-32 substitution is a disubstituted amino group, where R₃ and R₄ can be any group similar to the illustrative groups shown attached to the amine in the right column under R in FIG. 8, Part A. While FIG. 8 shows the C-32-substituted compounds in which the C-15-methoxy is present, the invention includes these C-32-substituted compounds in which C-15 is ethyl, methyl, or hydrogen. Also, while C-21 is shown as substituted with ethyl or allyl, the compounds of the invention includes the C-32-substituted compounds in which C-21 is substituted with hydrogen or methyl.

[0187] To make these C-32-substituted compounds, FIG. 8, Part B, provides illustrative reaction schemes. Thus, a selective reaction of the starting compound (see FIG. 8, Part B, for an illustrative starting compound) with trifluoromethanesulfonic anhydride in the presence of a base yields the C-320-triflate derivative, as shown in the upper scheme of FIG. 8, Part B. Displacement of the triflate with 1H-tetrazole or triazole derivatives provides the C-32 tetrazole or teiazole derivative. As shown in the lower scheme of FIG. 8, Part B, reacting the starting compound with p-nitrophenylchloroformate yields the corresponding carbonate, which, upon displacement with an amino compound, provides the corresponding carbamate derivative.

[0188] The compounds can be readily formulated to provide the pharmaceutical compositions of the invention. The pharmaceutical compositions of the invention can be used in the form of a pharmaceutical preparation, for example, in solid, semisolid, or liquid form. This preparation contains one or more of the compounds of the invention as an active ingredient in admixture with an organic or inorganic carrier or excipient suitable for external, enteral, or parenteral application. The active ingredient may be compounded, for example, with the usual non-toxic, pharmaceutically acceptable carriers for tablets, pellets, capsules, suppositories, solutions, emulsions, suspensions, and any other form suitable for use. Suitable formulation processes and compositions for the compounds of the present invention are described with respect to tacrolimus in U.S. Pat. Nos. 5,939,427; 5,922,729; 5,385,907; 5,338,684; and 5,260,301, incorporated herein by reference. Many of the compounds of the invention contain one or more chiral centers, and all of the stereoisomers are included within the scope of the invention, as pure compounds as well as mixtures of stereoisomers. Thus the compounds of the invention may be supplied as a mixture of stereoisomers in any proportion.

[0189] The carriers which can be used include water, glucose, lactose, gum acacia, gelatin, mannitol, starch paste, magnesium trisilicate, talc, corn starch, keratin, colloidal silica, potato starch, urea, and other carriers suitable for use in manufacturing preparations, in solid, semi-solid, or liquified form. In addition, auxiliary stabilizing, thickening, and coloring agents and perfumes may be used. For example, the compounds of the invention may be utilized with hydroxypropyl methylcellulose essentially as described in U.S. Pat. No. 4,916,138, incorporated herein by reference, or with a surfactant essentially as described in EPO patent publication No. 428,169, incorporated herein by reference.

[0190] Oral dosage forms may be prepared essentially as described by Hondo et al., 1987, Transplantation Proceedings XIX, Supp. 6: 17-22, incorporated herein by reference. Dosage forms for external application may be prepared essentially as described in EPO patent publication No. 423,714, incorporated herein by reference. The active compound is included in the pharmaceutical composition in an amount sufficient to produce the desired effect upon the disease process or condition.

[0191] For the treatment of conditions and diseases relating to immunosuppression or neuronal damage, a compound of the invention may be administered orally, topically, parenterally, by inhalation spray, or rectally in dosage unit formulations containing conventional non-toxic pharmaceutically acceptable carriers, adjuvant, and vehicles. The term parenteral, as used herein, includes subcutaneous injections, and intravenous, intramuscular, and intrasternal injection or infusion techniques.

[0192] Dosage levels of the compounds of the present invention are of the order from about 0.01 mg to about 50 mg per kilogram of body weight per day, preferably from about 0.1 mg to about 10 mg per kilogram of body weight per day. The dosage levels are useful in the treatment of the above-indicated conditions (from about 0.7 mg to about 3.5 mg per patient per day, assuming a 70 kg patient). In addition, the compounds of the present invention may be administered on an intermittent basis, i.e., at semi-weekly, weekly, semi-monthly, or monthly intervals.

[0193] The amount of active ingredient that may be combined with the carrier materials to produce a single dosage form will vary depending upon the host treated and the particular mode of administration. For example, a formulation intended for oral administration to humans may contain from 0.5 mg to 5 g of active agent compounded with an appropriate and convenient amount of carrier material, which may vary from about 5 percent to about 95 percent of the total composition. Dosage unit forms will generally contain from about 0.5 mg to about 500 mg of active ingredient. For external administration, the compounds of the invention can be formulated within the range of, for example, 0.00001% to 60% by weight, preferably from 0.001% to 10% by weight, and most preferably from about 0.005% to 0.8% by weight. The compounds and compositions of the invention are useful in treating disease conditions using doses and administration schedules as described for tacrolimus in U.S. Pat. Nos. 5,542,436; 5,365,948; 5,348,966; and 5,196,437, incorporated herein by reference. The compounds of the invention can be used as single therapeutic agents or in combination with other therapeutic agents. Drugs that can be usefully combined with compounds of the invention include one or more immunosuppressant agents such as rapamycin, cyclosporin A, FK-506, or one or more neurotrophic agents.

[0194] It will be understood, however, that the specific dosage level for any particular patient will depend on a variety of factors. These factors include the activity of the specific compound employed; the age, body weight, general health, sex, and diet of the subject; the time and route of administration and the rate of excretion of the drug; whether a drug combination is employed in the treatment; and the severity of the particular disease or condition for which therapy is sought.

[0195] A detailed description of the invention having been provided above, the following examples are given for the purpose of illustrating the present invention and shall not be construed as being a limitation on the scope of the invention or claims.

### EXAMPLE 1

### Replacement of Methoxyl with Hydrogen or Methyl at C-13 of FK-520

[0196] The C-13 methoxyl group is introduced into FK-520 via an AT domain in extender module 8 of the PKS that is specific for hydroxymalonyl and by methylation of the hydroxyl group by an S-adenosyl methionine (SAM) dependent methyltransferase. Metabolism of FK-506 and FK-520 primarily involves oxidation at the C-13 position into an inactive derivative that is further degraded by host P450 and other enzymes. The present invention provides compounds related in structure to FK-506 and FK-520 that do not contain the C-13 methoxy group and exhibit greater stability and a longer half-life in vivo. These compounds are useful medicaments due to their immunosuppressive and neurotrophic activities, and the invention provides the compounds in purified form and as pharmaceutical compositions.

[0197] The present invention also provides the novel PKS enzymes that produce these novel compounds as well as the expression vectors and host cells that produce the novel PKS enzymes. The novel PKS enzymes include, among others, those that contain an AT domain specific for either malonyl CoA or methylmalonyl CoA in module 8 of the FK-506 and FK-520 PKS. This example describes the construction of recombinant DNA compounds that encode the novel FK-520 PKS enzymes and the transformation of host cells with those recombinant DNA compounds to produce the novel PKS enzymes and the polyketides produced thereby.

[0198] To construct an expression cassette for performing module 8 AT domain replacements in the FK-520 PKS, a 4.6 kb SphI fragment from the FK-520 gene cluster was cloned into plasmid pLitmus 38 (a cloning vector available from New England Biolabs). The 4.6 kb SphI fragment, which encodes the ACP domain of module 7 followed by module 8 through the KR domain, was isolated from an agarose gel after digesting the cosmid pKOS65-C31 with Sph I. The clone having the insert oriented so the single SacI site was nearest to the SpeI end of the polylinker was identified and designated as plasmid pKOS60-21-67. To generate appropriate cloning sites, two linkers were ligated sequentially as follows. First, a linker was ligated between the SpeI and SacI sites to introduce a BglII site at the 5′ end of the cassette, to eliminate interfering polylinker sites, and to reduce the total insert size to 4.5 kb (the limit of the phage KC515). The ligation reactions contained 5 picomolar unphosphorylated linker DNA and 0.1 picomolar vector DNA, i.e., a 50-fold molar excess of linker to vector. The linker had the following sequence (SEQ ID NOS:3-4):

5′-CTAGTGGGCAGATCTGGCAGCT-3′
3′-ACCCGTCTAGACCG-5′

[0199] The resulting plasmid was designated pKOS60-27-1.

[0200] Next, a linker of the following sequence was ligated between the unique SphI and AflII sites of plasmid pKOS60-27-1 to introduce an NsiI site at the 3′ end of the module 8 cassette. The linker employed was (SEQ ID NOS:5-6):

5′-GGGATGCATGGC-3′
3′-GTACCCCTACGTACCGAATT-5′

[0201] The resulting plasmid was designated pKOS60-29-55.

[0202] To allow in-frame insertions of alternative AT domains, sites were engineered at the 5′ end (Avr II or Nhe I) and 3′ end (Xho I) of the AT domain using the polymerase chain reaction (PCR) as follows. Plasmid pKOS60-29-55 was used as a template for the PCR and sequence 5′ to the AT domain was amplified with the primers SpeBgl-fwd and either Avr-rev or Nhe-rev: (SEQ ID NOS:7-9)

| | |
|---|---|
| SpeBgl-fwd | 5′-CGACTCACTAGTGGGCAGATCTGG-3′ |
| Avr-rev | 5′-CACGCCTAGGCCGGTCGGTCTCGGGGCAC-3′ |
| Nhe-rev | 5′-GCGGCTAGCTGCTCGCCCATCGCGGGATGC-3′ |

[0203] The PCR included, in a 50 μl reaction, 5 μl of 10×Pfu polymerase buffer (Stratagene), 5 μl 10×z-dNTP mixture (2 mM dATP, 2 mM dCTP, 2 mM dTTP, 1 mM dGTP, 1 mM 7-deaza-GTP), 5 μl DMSO, 2 μl of each primer (10 μM), 1 μl of template DNA (0.1 μg/μl), and 1 μl of cloned Pfu polymerase (Stratagene). The PCR conditions were 95° C. for 2 min., 25 cycles at 95° C. for 30 sec., 60° C. for 30 sec., and 72° C. for 4 min., followed by 4 min. at 72° C. and a hold at 0° C. The amplified DNA products and the Litmus vectors were cut with the appropriate restriction enzymes (BglII and AvrII or SpeI and NheI), and cloned into either pLitmus 28 or pLitmus38 (New England Biolabs), respectively, to generate the constructs designated pKOS60-37-4 and pKOS60-37-2, respectively.

[0204] Plasmid pKOS60-29-55 was again used as a template for PCR to amplify sequence 3′ to the AT domain using the primers BsrXho-fwd and NsiAfl-rev (SEQ ID NOS:10-11):

BsrXho-fwd
5′-GATGTACAGCTCGAGTCGGCACGCCCGGCCGCATC-3′
NsiAfl-rev
5′-CGACTCACTTAAGCCATGCATCC-3′

[0205] PCR conditions were as described above. The PCR fragment was cut with BsrGI and AflII, gel isolated, and ligated into pKOS60-37-4 cut with Asp718 and AflII and inserted into pKOS60-37-2 cut with BsrGI and AflII, to give the plasmids pKOS60-39-1 and pKOS60-39-13, respectively. These two plasmids can be digested with AvrII and XhoI or NheI and XhoI, respectively, to insert heterologous AT domains specific for malonyl, methylmalonyl, ethylmalonyl, or other extender units.

[0206] Malonyl and methylmalonyl-specific AT domains were cloned from the rapamycin cluster using PCR amplification with a pair of primers that introduce an AvrII or NheI site at the 5′ end and an XhoI site at the 3′ end. The PCR conditions were as given above and the primer sequences were as follows (SEQ ID NOS:12-15):

[chemical structure]

[0207] Because of the high sequence similarity in each module of the rapamycin cluster, each primer was expected to prime any of the AT domains. PCR products representing ATs specific for malonyl or methylmalonyl extenders were identified by sequencing individual cloned PCR products. Sequencing also confirmed that the chosen clones contained no cloning artifacts. Examples of hybrid modules with the rapamycin AT12 and AT13 domains are shown in a separate figure.

[0208] The AvrII-XhoI restriction fragment that encodes module 8 of the FK-520 PKS with the endogenous AT domain replaced by the AT domain of module 12 of the rapamycin PKS has the DNA sequence and encodes the amino acid sequence shown below. The AT of rap module 12 is specific for incorporation of malonyl units (SEQ ID NOS:16-17).

| | |
|---|---|
| AGATCTGGCAGCTCGCCGAAGCGCTGCTGACGCTCGTCCGGGAGAGCACC | 50 |
| I W Q L A E A L L T L V R E S T | |
| GCCGCCGTGCTCGGCCACGTGGGTGGCGAGGACATCCCCGCGACGGCGGC | 100 |
| A A V L G H V G G E D I P A T A A | |
| GTTCAAGGACCTCGGCATCGACTCGCTCACCGCGGTCCAGCTGCGCAACG | 150 |
| F K D L G I D S L T A V W L R N | |
| CCCTCACCGAGGCGACCGGTGTGCGGCTGAACGCCACGGCGGTCTTCGAC | 200 |
| A L T E A T G V R L N A T A V F D | |
| TTCCCGACCCCGCACGTGCTCGCCGGGAAGCTCGGCGACGAACTGACCGG | 250 |
| F P T P H V L A G K L G D E L T G | |
| CACCCGCGCGCCCGTCGTGCCCCGGACCGCGGCCACGGCCGGTGCGCACG | 300 |
| T R A P V V P R T A A T A G A H | |
| ACGAGCCGCTGGCGATCGTGGGAATGGCCTGCCGGCTGCCCGGCGGGGTC | 350 |
| D E P L A I V G M A C R L P G G V | |
| GCGTCACCCGAGGAGCTGTGGCACCTCGTGGCATCCGGCACCGACGCCAT | 400 |
| A S P E E L W H L V A S G T D A I | |
| CACGGAGTTCCCGACGGACCGCGGCTGGGACGTCGACGCGATCTACGACC | 450 |
| T E F P T D R G W D V D A I Y D | |
| CGGACCCCGACGCGATCGGCAAGACCTTCGTCCGGCACGGTGGCTTCCTC | 500 |
| P D P D A I G K T F V R H G G F L | |
| ACCGGCGCGACAGGCTTCGACGCGGCGTTCTTCGGCATCAGCCCGCGCGA | 550 |
| T G A T G F D A A F F G I S P R E | |
| GGCCCTCGCGATGGACCCGCAGCAGCGGGTGCTCCTGGAGACGTCGTGGG | 600 |
| A L A M D P Q Q R V L L E T S W | |
| AGGCGTTCGAAAGCGCCGGCATCACCCCGGACTCGACCCGCGGCAGCGAC | 650 |
| E A F E S A G I T P D S T R G S D | |
| ACCGGCGTGTTCGTCGGCGCCTTCTCCTACGGTTACGGCACCGGTGCGGA | 700 |
| T G V F V G A F S Y G Y G T G A D | |
| CACCGACGGCTTCGGCGCGACCGGCTCGCAGACCAGTGTGCTCTCCGGCC | 750 |
| T D G F G A T G S Q T S V L S G | |
| GGCTGTCGTACTTCTACGGTCTGGAGGGTCCGGCGGTCACGGTCGACACG | 800 |
| R L S Y F Y G L E G P A V T V D T | |
| GCGTGTTCGTCGTCGCTGGTGGCGCTGCACCAGGCCGGGCAGTCGCTGCG | 850 |
| A C S S S L V A L H Q A G Q S L R | |
| CTCCGGCGAATGCTCGCTCGCCCTGGTCGGCGGCGTCACGGTGATGGCGT | 900 |
| S G E C S L A L V G G V T V M A | |
| CTCCCGGCGGCTTCGTGGAGTTCTCCCGGCAGCGCGGCCTCGCGCCGGAC | 950 |
| S P G G F V E F S R Q R G L A P D | |
| GGCCGGGCGAAGGCGTTCGGCGCGGGTGCGGACGGCACGAGCTTCGCCGA | 1000 |
| G R A K A F G A G A D G T S F A E | |
| GGGTGCCGGTGTGCTGATCGTCGAGAGGCTCTCCGACGCCGAACGCAACG | 1050 |
| G A G V L I V E R L S D A E R N | |
| GTCACACCGTCCTGGCGGTCGTCCGTGGTTCGGCGGTCAACCAGGATGGT | 1100 |
| G H T V L A V V R G S A V N Q D G | |
| GCCTCCAACGGGCTGTCGGCGCCGAACGGGCCGTCGCAGGAGCGGGTGAT | 1150 |
| A S N G L S A P N G P S Q E R V I | |
| CCGGCAGGCCCTGGCCAACGCCGGGCTCACCCCGGCGGACGTGGACGCCG | 1200 |
| R Q A L A N A G L T P A D V D A | |
| TCGAGGCCCACGGCACCGGCACCAGGCTGGGCGACCCCATCGAGGCACAG | 1250 |
| V E A H G T G T R L G D P I E A Q | |
| GCGGTACTGGCCACCTACGGACAGGAGCGCGCCACCCCCCTGCTGCTGGG | 1300 |
| A V L A T Y G Q E R A T P L L L G | |
| CTCGCTGAAGTCCAACATCGGCCACGCCCAGGCCGCGTCCGGCGTCGCCG | 1350 |
| S L K S N I G H A Q A A S G V A | |
| GCATCATCAAGATGGTGCAGGCCCTCCGGCACGGGGAGCTGCCGCCGACG | 1400 |
| G I I K M V Q A L R H G E L P P T | |
| CTGCACGCCGACGAGCCGTCGCCGCACGTCGACTGGACGGCCGGCGCCGT | 1450 |
| L H A D E P S P H V D W T A G A V | |
| CGAACTGCTGACGTCGGCCCGGCCGTGGCCCGAGACCGACCGGCCTAGGC | 1500 |
| E L L T S A R P W P E T D R P R | |
| GGGCAGGCGTGTCGTCCTTCGGGATCAGTGGCACCAACGCCCACGTCATC | 1550 |
| R A G V S S F G I S G T N A H V I | |
| CTGGAAAGCGCACCCCCCACTCAGCCTGCGGACAACGCGGTGATCGAGCG | 1600 |
| L E S A P P T Q P A D N A V I E R | |
| GGCACCGGAGTGGGTGCCGTTGGTGATTTCGGCCAGGACCCAGTCGGCTT | 1650 |
| A P E W V P L V I S A R T Q S A | |
| TGACTGAGCACGAGGGCCGGTTGCGTGCGTATCTGGCGGCGTCGCCCGGG | 1700 |
| L T E H E G R L R A Y L A A S P G | |
| GTGGATATGCGGGCTGTGGCATCGACGCTGGCGATGACACGGTCGGTGTT | 1750 |
| V D M R A V A S T L A M T R S V F | |
| CGAGCACCGTGCCGTGCTGCTGGGAGATGACACCGTCACCGGCACCGCTG | 1800 |
| E H R A V L L G D D T V T G T A | |
| TGTCTGACCCTCGGGCGGTGTTCGTCTTCCCGGGACAGGGGTCGCAGCGT | 1850 |
| V S D P R A V F V F P G Q G S Q R | |
| GCTGGCATGGGTGAGGAACTGGCCGCCGCGTTCCCCGTCTTCGCGCGGAT | 1900 |
| A G M G E E L A A A F P V F A R I | |
| CCATCAGCAGGTGTGGGACCTGCTCGATGTGCCCGATCTGGAGGTGAACG | 1950 |
| H Q Q V W D L L D V P D L E V N | |
| AGACCGGTTACGCCCAGCCGGCCCTGTTCGCAATGCAGGTGGCTCTGTTC | 2000 |
| E T G Y A Q P A L F A M Q V A L F | |
| GGGCTGCTGGAATCGTGGGGTGTACGACCGGACGCGGTGATCGGCCATTC | 2050 |
| G L L E S W G V R P D A V I G H S | |
| GGTGGGTGAGCTTGCGGCTGCGTATGTGTCCGGGGTGTGGTCGTTGGAGG | 2100 |
| B G E L A A A Y V S G V W S L E | |
| ATGCCTGCACTTTGGTGTCGGCGCGGGCTCGTCTGATGCAGGCTCTGCCC | 2150 |
| D A C T L V S A R A R L M Q A L P | |
| GCGGGTGGGGTGATGGTCGCTGTCCCGGTCTCGGAGGATGAGGCCCGGGC | 2200 |
| A G G V M V A V P V S E D E A R A | |
| CGTGCTGGGTGAGGGTGTGGAGATCGCCGCGGTCAACGGCCCGTCGTCGG | 2250 |
| V L G E G V E I A A V N G P S S | |
| TGGTTCTCTCCGGTGATGAGGCCGCCGTGCTGCAGGCCGCGGAGGGGCTG | 2300 |
| V V L S G D E A A V L Q A A E G L | |
| GGGAAGTGGACGCGGCTGGCGACCAGCCACGCGTTCCATTCCGCCCGTAT | 2350 |
| G K W T R L A T S H A F H S A R M | |
| GGAACCCATGCTGGAGGAGTTCCGGGCGGTGGCCGAAGGCCTGACCTACC | 2400 |
| E P M L E E F R A V A E G L T Y | |
| GGACGCCGCAGGTCTCCATGGCCGTTGGTGATCAGGTGACCACCGCTGAG | 2450 |
| R T P Q V S M A V G D Q V T T A E | |
| TACTGGGTGCGGCAGGTCCGGGACACGGTCCGGTTCGGCGAGCAGGTGGC | 2500 |
| Y W V R Q V R D T V R F G E Q V A | |
| CTCGTACGAGGACGCCGTGTTCGTCGAGCTGGGTGCCGACCGGTCACTGG | 2550 |
| S Y E D A V F V E L G A D R S L | |
| CCCGCCTGGTCGACGGTGTCGCGATGCTGCACGGCGACCACGAAATCCAG | 2600 |
| A R L V D G V A M L H G D H E I Q | |
| GCCGCGATCGGCGCCCTGGCCCACCTGTATGTCAACGGCGTCACGGTCGA | 2650 |
| A A I G A L A H L Y V N G V T V D | |
| CTGGCCCGCGCTCCTGGGCGATGCTCCGGCAACACGGGTGCTGGACCTTC | 2700 |
| W P A L L G D A P A T R V L D L | |
| CGACATACGCCTTCCAGCACCAGCGCTACTGGCTCGAGTCGGCACGCCCG | 2750 |
| P T Y A F Q H Q R Y W L E S A R P | |
| GCCGCATCCGACGCGGGCCACCCCGTGCTGGGCTCCGGTATCGCCCTCGC | 2800 |
| A A S D A G H P V L G S G I A L A | |
| CGGGTCGCCGGGCCGGGTGTTCACGGGTTCCGTGCCGACCGGTGCGGACC | 2850 |
| G S P G R V F T G S V P T G A D | |
| GCGCGGTGTTCGTCGCCGAGCTGGCGCTGGCCGCCGCGGACGCGGTCGAC | 2900 |
| R A V F V A E L A L A A A D A V D | |
| TGCGCCACGGTCGAGCGGCTCGACATCGCCTCCGTGCCCGGCCGGCCGGG | 2950 |
| C A T V E R L D I A S V P G R P G | |
| CCATGGCCGGACGACCGTACAGACCTGGGTCGACGAGCCGGCGGACGACG | 3000 |
| H G R T T V Q T W V D E P A D D | |
| GCCGGCGCCGGTTCACCGTGCACACCCGCACCGGCGACGCCCCGTGGACG | 3050 |
| G R R R F T V H T R T G D A P W T | |
| CTGCACGCCGAGGGGGTGCTGCGCCCCCATGGCACGGCCCTGCCCGATGC | 3100 |
| L H A E G V L R P H G T A L P D A | |
| GGCCGACGCCGAGTGGCCCCCACCGGGCGCGGTGCCCGCGGACGGGCTGC | 3150 |
| A D A E W P P P G A V P A D G L | |
| CGGGTGTGTGGCGCCGGGGGGACCAGGTCTTCGCCGAGGCCGAGGTGGAC | 3200 |
| P G V W R R G D Q V F A E A E V D | |
| GGACCGGACGGTTTCGTGGTGCACCCCGACCTGCTCGACGCGGTCTTCTC | 3250 |
| G P D G F V V H P D L L D A V F S | |
| CGCGGTCGGCGACGGAAGCCGCCAGCCGGCCGGATGGCGCGACCTGACGG | 3300 |
| A V G D G S R Q P A G W R D L T | |
| TGCACGCGTCGGACGCCACCGTACTGCGCGCCTGCCTCACCCGGCGCACC | 3350 |
| V H A S D A T V L R A C L T R R T | |
| GACGGAGCCATGGGATTCGCCGCCTTCGACGGCGCCGGCCTGCCGGTACT | 3400 |
| D G A M G F A A F D G A G L P V L | |
| CACCGCGGAGGCGGTGACGCTGCGGGAGGTGGCGTCACCGTCCGGCTCCG | 3450 |
| T A E A V T L R E V A S P S G S | |
| AGGAGTCGGACGGCCTGCACCGGTTGGAGTGGCTCGCGGTCGCCGAGGCG | 3500 |
| E E S D G L H R L E W L A V A E A | |
| GTCTACGACGGTGACCTGCCCGAGGGACATGTCCTGATCACCGCCGCCCA | 3550 |
| V Y D G D L P E G H V L I T A A H | |
| CCCCGACGACCCCGAGGACATACCCACCCGCGCCCACACCCGCGCCACCC | 3600 |
| P D D P E D I P T R A H T R A T | |
| GCGTCCTGACCGCCCTGCAACACCACCTCACCACCACCGACCACACCCTC | 3650 |
| R V L T A L Q H H L T T T D H T L | |
| ATCGTCCACACCACCACCGACCCCGCCGGCGCCACCGTCACCGGCCTCAC | 3700 |
| I V H T T T D P A G A T V T G L T | |
| CCGCACCGCCCAGAACGAACACCCCCACCGCATCCGCCTCATCGAAACCG | 3750 |
| R T A Q N E H P H R I R L I E T | |
| ACCACCCCCACACCCCCCTCCCCCTGGCCCAACTCGCCACCCTCGACCAC | 3800 |
| D H P H T P L P L A Q L A T L D H | |
| CCCCACCTCCGCCTCACCCACCACACCCTCCACCACCCCCACCTCACCCC | 3850 |
| P H L R L T H H T L H H P H L T P | |
| CCTCCACACCACCACCCCACCCACCACCACCCCCCTCAACCCCGAACACG | 3900 |
| L H T T T P P T T T P L N P E H | |
| CCATCATCATCACCGGCGGCTCCGGCACCCTCGCCGGCATCCTCGCCCGC | 3950 |
| A I I I T G G S G T L A G I L A R | |
| CACCTGAACCACCCCCACACCTACCTCCTCTCCCGCACCCCACCCCCCGA | 4000 |
| H L N H P H T Y L L S R T P P P D | |
| CGCCACCCCCGGCACCCACCTCCCCTGCGACGTCGGCGACCCCCACCAAC | 4050 |
| A T P G T H L P C D V G D P H Q | |
| TCGCCACCACCCTCACCCACATCCCCCAACCCCTCACCGCCATCTTCCAC | 4100 |
| L A T T L T H I P Q P L T A I F H | |
| ACCGCCGCCACCCTCGACGACGGCATCCTCCACGCCCTCACCCCCGACCG | 4150 |
| T A A T L D D G I L H A L T P D R | |
| CCTCACCACCGTCCTCCACCCCAAAGCCAACGCCGCCTGGCACCTGCACC | 4200 |
| L T T V L H P K A N A A W H L H | |
| ACCTCACCCAAAACCAACCCCTCACCCACTTCGTCCTCTACTCCAGCGCC | 4250 |
| H L T Q N Q P L T H F V L Y S S A | |
| GCCGCCGTCCTCGGCAGCCCCGGACAAGGAAACTACGCCGCCGCCAACGC | 4300 |
| A A V L G S P G Q G N Y A A A N A | |
| CTTCCTCGACGCCCTCGCCACCCACCGCCACACCCTCGGCCAACCCGCCA | 4350 |
| F L D A L A T H R H T L G Q P A | |
| CCTCCATCGCCTGGGGCATGTGGCACACCACCAGCACCCTCACCGGACAA | 4400 |
| T S I A W G M W H T T S T L T G Q | |
| CTCGACGACGCCGACCGGGACCGCATCCGCCGCGGCGGTTTCCTCCCGAT | 4450 |
| L D D A D R D R I R R G G F L P I | |
| CACGGACGACGAGGGCATGGGGATGCAT | |
| T D D E G | |

[0209] The AvrII-XhoI restriction fragment that encodes module 8 of the FK-520 PKS with the endogenous AT domain replaced by the AT domain of module 13 (specific for methylmalonyl CoA) of the rapamycin PKS has the DNA sequence and encodes the amino acid sequence shown below (SEQ ID NOS:18-19).

| | |
|---|---|
| AGATCTGGCAGCTCGCCGAAGCGCTGCTGACGCTCGTCCGGGAGAGCACC | 50 |
| Q L A E A L L T L V R E S T | |
| GCCGCCGTGCTCGGCCACGTGGGTGGCGAGGACATCCCCGCGACGGCGGC | 100 |
| A A V L G H V G G E D I P A T A A | |
| GTTCAAGGACCTCGGCATCGACTCGCTCACCGCGGTCCAGCTGCGCAACG | 150 |
| F K D L G I D S L T A V Q L R N | |
| CCCTCACCGAGGCGACCGGTGTGCGGCTGAACGCCACGGCGGTCTTCGAC | 200 |
| A L T E A T G V R L N A T A V F D | |
| TTCCCGACCCCGCACGTGCTCGCCGGGAAGCTCGGCGACGAACTGACCGG | 250 |
| F P T P H V L A G K L G D E L T G | |
| CACCCGCGCGCCCGTCGTGCCCCGGACCGCGGCCACGGCCGGTGCGCACG | 300 |
| T R A P V V P R T A A T A G A J | |
| ACGAGCCGCTGGCGATCGTGGGAATGGCCTGCCGGCTGCCCGGCGGGGTC | 350 |
| D E P L A I V G M A C R L P G G V | |
| GCGTCACCCGAGGAGCTGTGGCACCTCGTGGCATCCGGCACCGACGCCAT | 400 |
| A S P E E L W H L V A S G T D A I | |
| CACGGAGTTCCCGACGGACCGCGGCTGGGACGTCGACGCGATCTACGACC | 450 |
| T E F P T D R G W D V D A I Y D | |
| CGGACCCCGACGCGATCGGCAAGACCTTCGTCCGGCACGGTGGCTTCCTC | 500 |
| P D P D A I G K T F V R H G G F L | |
| ACCGGCGCGACAGGCTTCGACGCGGCGTTCTTCGGCATCAGCCCGCGCGA | 550 |
| T G A T G F D A A F F G I S P R E | |
| GGCCCTCGCGATGGACCCGCAGCAGCGGGTGCTCCTGGAGACGTCGTGGG | 600 |
| A L A M D P Q Q R V L L E T S W | |
| AGGCGTTCGAAAGCGCCGGCATCACCCCGGACTCGACCCGCGGCAGCGAC | 650 |
| E A F E S A G I T P D S T R G S D | |
| ACCGGCGTGTTCGTCGGCGCCTTCTCCTACGGTTACGGCACCGGTGCGGA | 700 |
| T G V F V G A F S Y G Y G T G A D | |
| CACCGACGGCTTCGGCGCGACCGGCTCGCAGACCAGTGTGCTCTCCGGCC | 750 |
| T D G F G A T G S Q T S V L S G | |
| GGCTGTCGTACTTCTACGGTCTGGAGGGTCCGGCGGTCACGGTCGACACG | 800 |
| R L S Y F Y G L E G P A V T V D T | |
| GCGTGTTCGTCGTCGCTGGTGGCGCTGCACCAGGCCGGGCAGTCGCTGCG | 850 |
| A C S S S L V A L H Q A G Q S L R | |
| CTCCGGCGAATGCTCGCTCGCCCTGGTCGGCGGCGTCACGGTGATGGCGT | 900 |
| S G E C S L A L V G G V T V M A | |
| CTCCCGGCGGCTTCGTGGAGTTCTCCCGGCAGCGCGGCCTCGCGCCGGAC | 950 |
| S P G G F V E F S R Q R G L A P D | |
| GGCCGGGCGAAGGCGTTCGGCGCGGGTGCGGACGGCACGAGCTTCGCCGA | 1000 |
| G R A K A F G A G A D G T S F A E | |
| GGGTGCCGGTGTGCTGATCGTCGAGAGGCTCTCCGACGCCGAACGCAACG | 1050 |
| G A G V L I V E R L S D A E R N | |
| GTCACACCGTCCTGGCGGTCGTCCGTGGTTCGGCGGTCAACCAGGATGGT | 1100 |
| G H T V L A V V R G S A V N Q D G | |
| GCCTCCAACGGGCTGTCGGCGCCGAACGGGCCGTCGCAGGAGCGGGTGAT | 1150 |
| A S N G L S A P N G P S Q E R V I | |
| CCGGCAGGCCCTGGCCAACGCCGGGCTCACCCCGGCGGACGTGGACGCCG | 1200 |
| R Q A L A N A G L T P A D V D A | |
| TCGAGGCCCACGGCACCGGCACCAGGCTGGGCGACCCCATCGAGGCACAG | 1250 |
| V E A H G T G T R L G D P I E A Q | |
| GCGGTACTGGCCACCTACGGACAGGAGCGCGCCACCCCCCTGCTGCTGGG | 1300 |
| A V L A T Y G Q E R A T P L L L G | |
| CTCGCTGAAGTCCAACATCGGCCACGCCCAGGCCGCGTCCGGCGTCGCCG | 1350 |
| S L K S N I G H A Q A A S G V A | |
| GCATCATCAAGATGGTGCAGGCCCTCCGGCACGGGGAGCTGCCGCCGACG | 1400 |
| G I I K M V Q A L R H G E L P P T | |
| CTGCACGCCGACGAGCCGTCGCCGCACGTCGACTGGACGGCCGGCGCCGT | 1450 |
| L H A D E P S P H V D W T A G A V | |
| CGAACTGCTGACGTCGGCCCGGCCGTGGCCCGAGACCGACCGGCCTAGGC | 1500 |
| E L L T S A R P W P E T D R P R | |
| GGGCGGGCGTGTCGTCCTTCGGAGTCAGCGGCACCAACGCCCACGTCATC | 1550 |
| R A G V S S F G V S G T N A H V I | |
| CTGGAGAGCGCACCCCCCGCTCAGCCCGCGGAGGAGGCGCAGCCTGTTGA | 1600 |
| L E S A P P A Q P A E E A Q P V E | |
| GACGCCGGTGGTGGCCTCGGATGTGCTGCCGCTGGTGATATCGGCCAAGA | 1650 |
| T P V V A S D V L P L V I S A K | |
| CCCAGCCCGCCCTGACCGAACACGAAGACCGGCTGCGCGCCTACCTGGCG | 1700 |
| T Q P A L T E H E D R L R A Y L A | |
| GCGTCGCCCGGGGCGGATATACGGGCTGTGGCATCGACGCTGGCGGTGAC | 1750 |
| A S P G A D I R A V A S T L A V T | |
| ACGGTCGGTGTTCGAGCACCGCGCCGTACTCCTTGGAGATGACACCGTCA | 1800 |
| R S V F E H R A V L L G D D T V | |
| CCGGCACCGCGGTGACCGACCCCAGGATCGTGTTTGTCTTTCCCGGGCAG | 1850 |
| T G T A V T D P R I V F V F P G Q | |
| GGGTGGCAGTGGCTGGGGATGGGCAGTGCACTGCGCGATTCGTCGGTGGT | 1900 |
| G W Q W L G M G S A L R D S S V V | |
| GTTCGCCGAGCGGATGGCCGAGTGTGCGGCGGCGTTGCGCGAGTTCGTGG | 1950 |
| F A E R M A E C A A A L R E F V | |
| ACTGGGATCTGTTCACGGTTCTGGATGATCCGGCGGTGGTGGACCGGGTT | 2000 |
| D W D L F T V L D D P A V V D R V | |
| GATGTGGTCCAGCCCGCTTCCTGGGCGATGATGGTTTCCCTGGCCGCGGT | 2050 |
| D V V Q P A S W A M M V S L A A V | |
| GTGGCAGGCGGCCGGTGTGCGGCCGGATGCGGTGATCGGCCATTCGCAGG | 2100 |
| W Q A A G V R P D A V I G H S Q | |
| GTGAGATCGCCGCAGCTTGTGTGGCGGGTGCGGTGTCACTACGCGATGCC | 2150 |
| G E I A A A C V A G A V S L R D A | |
| GCCCGGATCGTGACCTTGCGCAGCCAGGCGATCGCCCGGGGCCTGGCGGG | 2200 |
| A R I V T L R S Q A I A R G L A G | |
| CCGGGGCGCGATGGCATCCGTCGCCCTGCCCGCGCAGGATGTCGAGCTGG | 2250 |
| R G A M A S V A L P A Q D V E L | |
| TCGACGGGGCCTGGATCGCCGCCCACAACGGGCCCGCCTCCACCGTGATC | 2300 |
| V D G A W I A A H N G P A S T V I | |
| GCGGGCACCCCGGAAGCGGTCGACCATGTCCTCACCGCTCATGAGGCACA | 2350 |
| A G T P E A V D H V L T A H E A Q | |
| AGGGGTGCGGGTGCGGCGGATCACCGTCGACTATGCCTCGCACACCCCGC | 2400 |
| G V R V R R I T V D Y A S H T P | |
| ACGTCGAGCTGATCCGCGACGAACTACTCGACATCACTAGCGACAGCAGC | 2450 |
| H V E L I R D E L L D I T S D S S | |
| TCGCAGACCCCGCTCGTGCCGTGGCTGTCGACCGTGGACGGCACCTGGGT | 2500 |
| S Q T P L V P W L S T V D G T W V | |
| CGACAGCCCGCTGGACGGGGAGTACTGGTACCGGAACCTGCGTGAACCGG | 2550 |
| D S P L D G E Y W Y R N L R E P | |
| TCGGTTTCCACCCCGCCGTCAGCCAGTTGCAGGCCCAGGGCGACACCGTG | 2600 |
| V G F H P A V S Q L Q A Q G D T V | |
| TTCGTCGAGGTCAGCGCCAGCCCGGTGTTGTTGCAGGCGATGGACGACGA | 2650 |
| F V E V S A S P V L L Q A M D D D | |
| TGTCGTCACGGTTGCCACGCTGCGTCGTGACGACGGCGACGCCACCCGGA | 2700 |
| V V T V A T L R R D D G D A T R | |
| TGCTCACCGCCCTGGCACAGGCCTATGTCCACGGCGTCACCGTCGACTGG | 2750 |
| M L T A L A Q A Y V H G V T V D W | |
| CCCGCCATCCTCGGCACCACCACAACCCGGGTACTGGACCTTCCGACCTA | 2800 |
| P A I L G T T T T R V L D L P T Y | |
| CGCCTTCCAACACCAGCGGTACTGGCTCGAGTCGGCACGCCCGGCCGCAT | 2850 |
| A F Q H Q R Y W L E S A R P A A | |
| CCGACGCGGGCCACCCCGTGCTGGGCTCCGGTATCGCCCTCGCCGGGTCG | 2900 |
| S D A G H P V L G S G I A L A G S | |
| CCGGGCCGGGTGTTCACGGGTTCCGTGCCGACCGGTGCGGACCGCGCGGT | 2950 |
| P G R V F T G S V P T G A D R A V | |
| GTTCGTCGCCGAGCTGGCGCTGGCCGCCGCGGACGCGGTCGACTGCGCCA | 3000 |
| F V A E L A L A A A D A V D C A | |
| CGGTCGAGCGGCTCGACATCGCCTCCGTGCCCGGCCGGCCGGGCCATGGC | 3050 |
| T V E R L D I A S V P G R P G H G | |
| CGGACGACCGTACAGACCTGGGTCGACGAGCCGGCGGACGACGGCCGGCG | 3100 |
| R T T V Q T W V D E P A D D G R R | |
| CCGGTTCACCGTGCACACCCGCACCGGCGACGCCCCGTGGACGCTGCACG | 3150 |
| R F T V H T R T G D A P W T L H | |
| CCGAGGGGGTGCTGCGCCCCCATGGCACGGCCCTGCCCGATGCGGCCGAC | 3200 |
| A E G V L R P H G T A L P D A A D | |
| GCCGAGTGGCCCCCACCGGGCGCGGTGCCCGCGGACGGGCTGCCGGGTGT | 3250 |
| A E W P P P G A V P A D G L P G V | |
| GTGGCGCCGGGGGGACCAGGTCTTCGCCGAGGCCGAGGTGGACGGACCGG | 3300 |
| W R R G D Q V F A E A E V D G P | |
| ACGGTTTCGTGGTGCACCCCGACCTGCTCGACGCGGTCTTCTCCGCGGTC | 3350 |
| D G F V V H P D L L D A V F S A V | |
| GGCGACGGAAGCCGCCAGCCGGCCGGATGGCGCGACCTGACGGTGCACGC | 3400 |
| G D G S R Q P A G W R D L T V H A | |
| GTCGGACGCCACCGTACTGCGCGCCTGCCTCACCCGGCGCACCGACGGAG | 3450 |
| S D A T V L R A C L T R R T D G | |
| CCATGGGATTCGCCGCCTTCGACGGCGCCGGCCTGCCGGTACTCACCGCG | 3500 |
| A M G F A A F D G A G L P V L T A | |
| GAGGCGGTGACGCTGCGGGAGGTGGCGTCACCGTCCGGCTCCGAGGAGTC | 3550 |
| E A V T L R E V A S P S G S E E S | |
| GGACGGCCTGCACCGGTTGGAGTGGCTCGCGGTCGCCGAGGCGGTCTACG | 3600 |
| D G L H R L E W L A V A E A V Y | |
| ACGGTGACdTGCCCGAGGGACATGTCCTGATCACCGCCGCCCACCCCGAC | 3650 |
| D G D L P E G H V L I T A A H P D | |
| GACCCCGAGGACATACCCACCCGCGCCCACACCCGCGCCACCCGCGTCCT | 3700 |
| D P E D I P T R A H T R A T R V L | |
| GACCGCCCTGCAACACCACCTCACCACCACCGACCACACCCTCATCGTCC | 3750 |
| T A L Q H H L T T T D H T L I V | |
| ACACCACCACCGACCCCGCCGGCGCCACCGTCACCGGCCTCACCCGCACC | 3800 |
| H T T T D P A G A T V T G L T R T | |
| GCCCAGAACGAACACCCCCACCGCATCCGCCTCATCGAAACCGACCACCC | 3850 |
| A Q N E H P H R I R L I E T D H P | |
| CCACACCCCCCTCCCCCTGGCCCAACTCGCCACCCTCGACCACCCCCACC | 3900 |
| H T P L P L A Q L A T L D H P H | |
| TCCGCCTCACCCACCACACCCTCCACCACCCCCACCTCACCCCCCTCCAC | 3950 |
| L R L T H H T L H H P H L T P L H | |
| ACCACCACCCCACCCACCACCACCCCCCTCAACCCCGAACACGCCATCAT | 4000 |
| T T T P P T T T P L N P E H A I I | |
| CATCACCGGCGGCTCCGGCACCCTCGCCGGCATCCTCGCCCGCCACCTGA | 4050 |
| I T G G S G T L A G I L A R H L | |
| ACCACCCCCACACCTACCTCCTCTCCCGCACCCCACCCCCCGACGCCACC | 4100 |
| N H P H T Y L L S R T P P P D A T | |
| CCCGGCACCCACCTCCCCTGCGACGTCGGCGACCCCCACCAACTCGCCAC | 4150 |
| P G T H L P C D V G D P H Q L A T | |
| CACCCTCACCCACATCCCCCAACCCCTCACCGCCATCTTCCACACCGCCG | 4200 |
| T L T H I P Q P L T A I F H T A | |
| CCACCCTCGACGACGGCATCCTCCACGCCCTCACCCCCGACCGCCTCACC | 4250 |
| A T L D D G I L H A L T P D R L T | |
| ACCGTCCTCCACCCCAAAGCCAACGCCGCCTGGCACCTGCACCACCTCAC | 4300 |
| T V L H P K A N A A W H L H H L T | |
| CCAAAACCAACCCCTCACCCACTTCGTCCTCTACTCCAGCGCCGCCGCCG | 4350 |
| Q N Q P L T H F V L Y S S A A A | |
| TCCTCGGCAGCCCCGGACAAGGAAACTACGCCGCCGCCAACGCCTTCCTC | 4400 |
| V L G S P G Q G N Y A A A N A F L | |
| GACGCCCTCGCCACCCACCGCCACACCCTCGGCCAACCCGCCACCTCCAT | 4450 |
| D A L A T H R H T L G Q P A T S I | |
| CGCCTGGGGCATGTGGCACACCACCAGCACCCTCACCGGACAACTCGACG | 4500 |
| A W G M W H T T S T L T G Q L D | |
| ACGCCGACCGGGACCGCATCCGCCGCGGCGGTTTCCTCCCGATCACGGAC | 4550 |
| D A D R D R I R R G G F L P I T D | |
| GACGAGGGCATGGGGATGCAT | |
| D E G | |

[0210] The NheII-XhoI restriction fragment that encodes module 8 of the FK-520 PKS with the endogenous AT domain replaced by the AT domain of module 12 (specific for malonyl CoA) of the rapamycin PKS has the DNA sequence and encodes the amino acid sequence shown below (SEQ ID NOS:20-21).

| | |
|---|---|
| AGATCTGGCAGCTCGCCGAAGCGCTGCTGACGCTCGTCCGGGAGAGCACC | 50 |
| Q L A E A L L T L V R E S T | |
| GCCGCCGTGCTCGGCCACGTGGGTGGCGAGGACATCCCCGCGACGGCGGC | 100 |
| A A V L G H V G G E D I P A T A A | |
| GTTCAAGGACCTCGGCATCGACTCGCTCACCGCGGTCCAGCTGCGCAACG | 150 |
| F K D L G I D S L T A V Q L R N | |
| CCCTCACCGAGGCGACCGGTGTGCGGCTGAACGCCACGGCGGTCTTCGAC | 200 |
| A L T E A T G V R L N A T A V F D | |
| TTCCCGACCCCGCACGTGCTCGCCGGGAAGCTCGGCGACGAACTGACCGG | 250 |
| F P T P H V L A G K L G D E L T G | |
| CACCCGCGCGCCCGTCGTGCCCCGGACCGCGGCCACGGCCGGTGCGCACG | 300 |
| T R A P V V P R T A A T A G A H | |
| ACGAGCCGCTGGCGATCGTGGGAATGGCCTGCCGGCTGCCCGGCGGGGTC | 350 |
| D E P L A I V G M A C R L P G G V | |
| GCGTCACCCGAGGAGCTGTGGCACCTCGTGGCATCCGGCACCGACGCCAT | 400 |
| A S P E E L W H L V A S G T D A I | |
| CACGGAGTTCCCGACGGACCGCGGCTGGGACGTCGACGCGATCTACGACC | 450 |
| T E F P T D R G W D V D A I Y D | |
| CGGACCCCGACGCGATCGGCAAGACCTTCGTCCGGCACGGTGGCTTCCTC | 500 |
| P D P D A I G K T F V R H G G F L | |
| ACCGGCGCGACAGGCTTCGACGCGGCGTTCTTCGGCATCAGCCCGCGCGA | 550 |
| T G A T G F D A A F F G I S P R E | |
| GGCCCTCGCGATGGACCCGCAGCAGCGGGTGCTCCTGGAGACGTCGTGGG | 600 |
| A L A M D P Q Q R V L L E T S W | |
| AGGCGTTCGAAAGCGCCGGCATCACCCCGGACTCGACCCGCGGCAGCGAC | 650 |
| E A F E S A G I T P D S T R G S D | |
| ACCGGCGTGTTCGTCGGCGCCTTCTCCTACGGTTACGGCACCGGTGCGGA | 700 |
| T G V F V G A F S Y G Y G T G A D | |
| CACCGACGGCTTCGGCGCGACCGGCTCGCAGACCAGTGTGCTCTCCGGCC | 750 |
| T D G F G A T G S Q T S V L S G | |
| GGCTGTCGTACTTCTACGGTCTGGAGGGTCCGGCGGTCACGGTCGACACG | 800 |
| R L S Y F Y G L E G P A V T V D T | |
| GCGTGTTCGTCGTCGCTGGTGGCGCTGCACCAGGCCGGGCAGTCGCTGCG | 850 |
| A C S S S L V A L H Q A G Q S L R | |
| CTCCGGCGAATGCTCGCTCGCCCTGGTCGGCGGCGTCACGGTGATGGCGT | 900 |
| S G E C S L A L V G G V T V M A | |
| CTCCCGGCGGCTTCGTGGAGTTCTCCCGGCAGCGCGGCCTCGCGCCGGAC | 950 |
| S P G G F V E F S R Q R G L A P D | |
| GGCCGGGCGAAGGCGTTCGGCGCGGGTGCGGACGGCACGAGCTTCGCCGA | 1000 |
| G R A K A F G A G A D G T S F A E | |
| GGGTGCCGGTGTGCTGATCGTCGAGAGGCTCTCCGACGCCGAACGCAACG | 1050 |
| G A G V L I V E R L S D A E R N | |
| GTCACACCGTCCTGGCGGTCGTCCGTGGTTCGGCGGTCAACCAGGATGGT | 1100 |
| G H T V L A V V R G S A V N Q D G | |
| GCCTCCAACGGGCTGTCGGCGCCGAACGGGCCGTCGCAGGAGCGGGTGAT | 1150 |
| A S N G L S A P N G P S Q E R V I | |
| CCGGCAGGCCCTGGCCAACGCCGGGCTCACCCCGGCGGACGTGGACGCCG | 1200 |
| R Q A L A N A G L T P A D V D A | |
| TCGAGGCCCACGGCACCGGCACCAGGCTGGGCGACCCCATCGAGGCACAG | 1250 |
| V E A H G T G T R L G D P I E A Q | |
| GCGGTACTGGCCACCTACGGACAGGAGCGCGCCACCCCCCTGCTGCTGGG | 1300 |
| A V L A T Y G Q E R A T P L L L G | |
| CTCGCTGAAGTCCAACATCGGCCACGCCCAGGCCGCGTCCGGCGTCGCCG | 1350 |
| S L K S N I G H A Q A A S G V A | |
| GCATCATCAAGATGGTGCAGGCCCTCCGGCACGGGGAGCTGCCGCCGACG | 1400 |
| G I I K M V Q A L R H G E L P P T | |
| CTGCACGCCGACGAGCCGTCGCCGCACGTCGACTGGACGGCCGGCGCCGT | 1450 |
| L H A D E P S P H V D W T A G A V | |
| CGAACTGCTGACGTCGGCCCGGCCGTGGCCCGAGACCGACCGGCCACGGC | 1500 |
| E L L T S A R P W P E T D R P R | |
| GTGCCGCCGTCTCCTCGTTCGGGGTGAGCGGCACCAACGCCCACGTCATC | 1550 |
| R A A V S S F G V S G T N A H V I | |
| CTGGAGGCCGGACCGGTAACGGAGACGCCCGCGGCATCGCCTTCCGGTGA | 1600 |
| L E A G P V T E T P A A S P S G D | |
| CCTTCCCCTGCTGGTGTCGGCACGCTCACCGGAAGCGCTCGACGAGCAGA | 1650 |
| L P L L V S A R S P E A L D E Q | |
| TCCGCCGACTGCGCGCCTACCTGGACACCACCCCGGACGTCGACCGGGTG | 1700 |
| I R R L R A Y L D T T P D V D R V | |
| GCCGTGGCACAGACGCTGGCCCGGCGCACACACTTCGCCCACCGCGCCGT | 1750 |
| A V A Q T L A R R T H F A H R A V | |
| GCTGCTCGGTGACACCGTCATCACCACACCCCCCGCGGACCGGCCCGACG | 1800 |
| L L G D T V I T T P P A D R P D | |
| AACTCGTCTTCGTCTACTCCGGCCAGGGCACCCAGCATCCCGCGATGGGC | 1850 |
| E L V F V Y S G Q G T Q H P A M G | |
| GAGCAGCTAGCCGCCGCGTTCCCCGTCTTCGCGCGGATCCATCAGCAGGT | 1900 |
| E Q L A A A F P V F A R I H Q Q V | |
| GTGGGACCTGCTCGATGTGCCCGATCTGGAGGTGAACGAGACCGGTTACG | 1950 |
| W D L L D V P D L E V N E T G Y | |
| CCCAGCCGGCCCTGTTCGCAATGCAGGTGGCTCTGTTCGGGCTGCTGGAA | 2000 |
| A Q P A L F A M Q V A L F G L L E | |
| TCGTGGGGTGTACGACCGGACGCGGTGATCGGCCATTCGGTGGGTGAGCT | 2050 |
| S W G V R P D A V I G H S V G E L | |
| TGCGGCTGCGTATGTGTCCGGGGTGTGGTCGTTGGAGGATGCCTGCACTT | 2100 |
| A A A Y V S G V W S L E D A C T | |
| TGGTGTCGGCGCGGGCTCGTCTGATGCAGGCTCTGCCCGCGGGTGGGGTG | 2150 |
| L V S A R A R L M Q A L P A G G V | |
| ATGGTCGCTGTCCCGGTCTCGGAGGATGAGGCCCGGGCCGTGCTGGGTGA | 2200 |
| M V A V P V S E D E A R A V L G E | |
| GGGTGTGGAGATCGCCGCGGTCAACGGCCCGTCGTCGGTGGTTCTCTCCG | 2250 |
| G V E I A A V N G O S S V V L S | |
| GTGATGAGGCCGCCGTGCTGCAGGCCGCGGAGGGGCTGGGGAAGTGGACG | 2300 |
| G D E A A V L Q A A E G L G K W T | |
| CGGCTGGCGACCAGCCACGCGTTCCATTCCGCCCGTATGGAACCCATGCT | 2350 |
| R L A T S H A F H S A R M E P M L | |
| GGAGGAGTTCCGGGCGGTCGCCGAAGGCCTGACCTACCGGACGCCGCAGG | 2400 |
| E E F R A V A E G L T Y R T P Q | |
| TCTCCATGGCCGTTGGTGATCAGGTGACCACCGCTGAGTACTGGGTGCGG | 2450 |
| V S M A V G D Q V T T A E Y W V R | |
| CAGGTCCGGGACACGGTCCGGTTCGGCGAGCAGGTGGCCTCGTACGAGGA | 2500 |
| Q V R D T V R F G E Q V A S Y E D | |
| CGCCGTGTTCGTCGAGCTGGGTGCCGACCGGTCACTGGCCCGCCTGGTCG | 2550 |
| A V F V E L G A D R S L A R L V | |
| ACGGTGTCGCGATGCTGCACGGCGACCACGAAATCCAGGCCGCGATCGGC | 2600 |
| D G V A M L H G D H E I Q A A I G | |
| GCCCTGGCCCACCTGTATGTCAACGGCGTCACGGTCGACTGGCCCGCGCT | 2650 |
| A L A H L Y V N G V T V D W P A L | |
| CCTGGGCGATGCTCCGGCAACACGGGTGCTGGACCTTCCGACATACGCCT | 2700 |
| L G D A P A T R V L D L P T Y A | |
| TCCAGCACCAGCGCTACTGGCTCGAGTCGGCACGCCCGGCCGCATCCGAC | 2750 |
| F Q H Q R Y W L E S A R P A A S D | |
| GCGGGCCACCCCGTGCTGGGCTCCGGTATCGCCCTCGCCGGGTCGCCGGG | 2800 |
| A G H P V L G S G I A L A G S P G | |
| CCGGGTGTTCACGGGTTCCGTGCCGACCGGTGCGGACCGCGCGGTGTTCG | 2850 |
| R V F T G S V P T G A D R A V F | |
| TCGCCGAGCTGGCGCTGGCCGCCGCGGACGCGGTCGACTGCGCCACGGTC | 2900 |
| V A E L A L A A A D A V D C A T V | |
| GAGCGGCTCGACATCGCCTCCGTGCCCGGCCGGCCGGGCCATGGCCGGAC | 2950 |
| E R L D I A S V P G R P G H G R T | |
| GACCGTACAGACCTGGGTCGACGAGCCGGCGGACGACGGCCGGCGCCGGT | 3000 |
| T V Q T W V D E P A D D G R R R | |
| TCACCGTGCACACCCGCACCGGCGACGCCCCGTGGACGCTGCACGCCGAG | 3050 |
| F T V H T R T G D A P W T L H A E | |
| GGGGTGCTGCGCCCCCATGGCACGGCCCTGCCCGATGCGGCCGACGCCGA | 3100 |
| G V L R P H G T A L P D A A D A E | |
| GTGGCCCCCACCGGGCGCGGTGCCCGCGGACGGGCTGCCGGGTGTGTGGC | 3150 |
| W P P P G A V P A D G L P G V W | |
| GCCGGGGGGACCAGGTCTTCGCCGAGGCCGAGGTGGACGGACCGGACGGT | 3200 |
| R R G D Q V F A E A E V D G P D G | |
| TTCGTGGTGCACCCCGACCTGCTCGACGCGGTCTTCTCCGCGGTCGGCGA | 3250 |
| F V V H P D L L D A V F S A V G D | |
| CGGAAGCCGCCAGCCGGCCGGATGGCGCGACCTGACGGTGCACGCGTCGG | 3300 |
| G S R Q P A G W R D L T V H A S | |
| ACGCCACCGTACTGCGCGCCTGCCTCACCCGGCGCACCGACGGAGCCATG | 3350 |
| D A T V L R A C L T R R T D G A M | |
| GGATTCGCCGCCTTCGACGGCGCCGGCCTGCCGGTACTCACCGCGGAGGC | 3400 |
| G F A A F D G A G L P V L T A E A | |
| GGTGACGCTGCGGGAGGTGGCGTCACCGTCCGGCTCCGAGGAGTCGGACG | 3450 |
| V T L R E V A S P S G S E E S D | |
| GCCTGCACCGGTTGGAGTGGCTCGCGGTCGCCGAGGCGGTCTACGACGGT | 3500 |
| G L H R L E W L A V A E A V Y D G | |
| GACCTGCCCGAGGGACATGTCCTGATCACCGCCGCCCACCCCGACGACCC | 3550 |
| D L P E G H V L I T A A H P D D P | |
| CGAGGACATACCCACCCGCGCCCACACCCGCGCCACCCGCGTCCTGACCG | 3600 |
| E D I P T R A H T R A T R V L T | |
| CCCTGCAACACCACCTCACCACCACCGACCACACCCTCATCGTCCACACC | 3650 |
| A L Q H H L T T T D H T L I V H T | |
| ACCACCGACCCCGCCGGCGCCACCGTCACCGGCCTCACCCGCACCGCCCA | 3700 |
| T T D P A G A T V T G L T R T A Q | |
| GAACGAACACCCCCACCGCATCCGCCTCATCGAAACCGACCACCCCCACA | 3750 |
| N E H P H R I R L I E T D H P H | |
| CCCCCCTCCCCCTGGCCCAACTCGCCACCCTCGACCACCCCCACCTCCGC | 3800 |
| T P L P L A Q L A T L D H P H L R | |
| CTCACCCACCACACCCTCCACCACCCCCACCTCACCCCCCTCCACACCAC | 3850 |
| L T H H T L H H P H L T P L H T T | |
| CACCCCACCCACCACCACCCCCCTCAACCCCGAACACGCCATCATCATCA | 3900 |
| T P P T T T P L N P E H A I I I | |
| CCGGCGGCTCCGGCACCCTCGCCGGCATCCTCGCCCGCCACCTGAACCAC | 3950 |
| T G G S G T L A G I L A R H L N H | |
| CCCCACACCTACCTCCTCTCCCGCACCCCACCCCCCGACGCCACCCCCGG | 4000 |
| P H T Y L L S R T P P P D A T P G | |
| CACCCACCTCCCCTGCGACGTCGGCGACCCCCACCAACTCGCCACCACCC | 4050 |
| T H L P C D V G D P H Q L A T T | |
| TCACCCACATCCCCCAACCCCTCACCGCCATCTTCCACACCGCCGCCACC | 4100 |
| L T H I P Q P L T A I F H T A A T | |
| CTCGACGACGGCATCCTCCACGCCCTCACCCCCGACCGCCTCACCACCGT | 4150 |
| L D D G I L H A L T P D R L T T V | |
| CCTCCACCCCAAAGCCAACGCCGCCTGGCACCTGCACCACCTCACCCAAA | 4200 |
| L H P K A N A A W H L H H L T Q | |
| ACCAACCCCTCACCCACTTCGTCCTCTACTCCAGCGCCGCCGCCGTCCTC | 4250 |
| N Q P L T H F V L Y S S A A A V L | |
| GGCAGCCCCGGACAAGGAAACTACGCCGCCGCCAACGCCTTCCTCGACGC | 4300 |
| G S P G Q G N Y A A A N A F L D A | |
| CCTCGCCACCCACCGCCACACCCTCGGCCAACCCGCCACCTCCATCGCCT | 4350 |
| L A T H R H T L G Q P A T S I A | |
| GGGGCATGTGGCACACCACCAGCACCCTCACCGGACAACTCGACGACGCC | 4400 |
| W G M W H T T S T L T G Q L D D A | |
| GACCGGGACCGCATCCGCCGCGGCGGTTTCCTCCCGATCACGGACGACGA | 4450 |
| D R D R I R R G G F L P I T D D E | |
| GGGCATGGGGATGCAT | |
| G | |

[0211] The NheII-XhoI restriction fragment that encodes module 8 of the FK-520 PKS with the endogenous AT domain replaced by the AT domain of module 13 (specific for methylmalonyl CoA) of the rapamycin PKS has the DNA sequence and encodes the amino acid sequence shown below (SEQ ID NOS:22-23).

| | |
|---|---|
| AGATCTGGCAGCTCGCCGAAGCGCTGCTGACGCTCGTCCGGGAGAGCACC | 50 |
| Q L A E A L L T L V R E S T | |
| GCCGCCGTGCTCGGCCACGTGGGTGGCGAGGACATCCCCGCGACGGCGGC | 100 |
| A A V L G H V G G E D I P A T A A | |
| GTTCAAGGACCTCGGCATCGACTCGCTCACCGCGGTCCAGCTGCGCAACG | 150 |
| F K D L G I D S L T A V Q L R N | |
| CCCTCACCGAGGCGACCGGTGTGCGGCTGAACGCCACGGCGGTCTTCGAC | 200 |
| A L T E A T G V R L N A T A V F D | |
| TTCCCGACCCCGCACGTGCTCGCCGGGAAGCTCGGCGACGAACTGACCGG | 250 |
| F P T P H V L A G K L G D E L T G | |
| CACCCGCGCGCCCGTCGTGCCCCGGACCGCGGCCACGGCCGGTGCGCACG | 300 |
| T R A P V V P R T A A T A G A H | |
| ACGAGCCGCTGGCGATCGTGGGAATGGCCTGCCGGCTGCCCGGCGGGGTC | 350 |
| D E P L A I V G M A C R L P G G V | |
| GCGTCACCCGAGGAGCTGTGGCACCTCGTGGCATCCGGCACCGACGCCAT | 400 |
| A S P E E L W H L V A S G T D A I | |
| CACGGAGTTCCCGACGGACCGCGGCTGGGACGTCGACGCGATCTACGACC | 450 |
| T E F P T D R G W D V D A I Y D | |
| CGGACCCCGACGCGATCGGCAAGACCTTCGTCCGGCACGGTGGCTTCCTC | 500 |
| P D P D A I G K T F V R H G G F L | |
| ACCGGCGCGACAGGCTTCGACGCGGCGTTCTTCGGCATCAGCCCGCGCGA | 550 |
| T G A T G F D A A F F G I S P R E | |
| GGCCCTCGCGATGGACCCGCAGCAGCGGGTGCTCCTGGAGACGTCGTGGG | 600 |
| A L A M D P Q Q R V L L E T S W | |
| AGGCGTTCGAAAGCGCCGGCATCACCCCGGACTCGACCCGCGGCAGCGAC | 650 |
| E A F E S A G I T P D S T R G S D | |
| ACCGGCGTGTTCGTCGGCGCCTTCTCCTACGGTTACGGCACCGGTGCGGA | 700 |
| T G V F V G A F S Y G Y G T G A D | |
| CACCGACGGCTTCGGCGCGACCGGCTCGCAGACCAGTGTGCTCTCCGGCC | 750 |
| T D G F G A T G S Q T S V L S G | |
| GGCTGTCGTACTTCTACGGTCTGGAGGGTCCGGCGGTCACGGTCGACACG | 800 |
| R L S Y F Y G L E G P A V T V D T | |
| GCGTGTTCGTCGTCGCTGGTGGCGCTGCACCAGGCCGGGCAGTCGCTGCG | 850 |
| A C S S S L V A L H Q A G Q S L R | |
| CTCCGGCGAATGCTCGCTCGCCCTGGTCGGCGGCGTCACGGTGATGGCGT | 900 |
| S G E C S L A L V G G V T V M A | |
| CTCCCGGCGGCTTCGTGGAGTTCTCCCGGCAGCGCGGCCTCGCGCCGGAC | 950 |
| S P G G F V E F S R Q R G L A P D | |
| GGCCGGGCGAAGGCGTTCGGCGCGGGTGCGGACGGCACGAGCTTCGCCGA | 1000 |
| G R A K A F G A G A D G T S F A E | |
| GGGTGCCGGTGTGCTGATCGTCGAGAGGCTCTCCGACGCCGAACGCAACG | 1050 |
| G A G V L I V E R L S D A E R N | |
| GTCACACCGTCCTGGCGGTCGTCCGTGGTTCGGCGGTCAACCAGGATGGT | 1100 |
| G H T V L A V V R G S A V N Q D G | |
| GCCTCCAACGGGCTGTCGGCGCCGAACGGGCCGTCGCAGGAGCGGGTGAT | 1150 |
| A S N G L S A P N G P S Q E R V I | |
| CCGGCAGGCCCTGGCCAACGCCGGGCTCACCCCGGCGGACGTGGACGCCG | 1200 |
| R Q A L A N A G L T P A D V D A | |
| TCGAGGCCCACGGCACCGGCACCAGGCTGGGCGACCCCATCGAGGCACAG | 1250 |
| V E A H G T G T R L G D P I E A Q | |
| GCGGTACTGGCCACCTACGGACAGGAGCGCGCCACCCCCCTGCTGCTGGG | 1300 |
| A V L A T Y G Q E R A T P L L L G | |
| CTCGCTGAAGTCCAACATCGGCCACGCCCAGGCCGCGTCCGGCGTCGCCG | 1350 |
| S L K S N I G H A Q A A S G V A | |
| GCATCATCAAGATGGTGCAGGCCCTCCGGCACGGGGAGCTGCCGCCGACG | 1400 |
| G I I K M V Q A L R H G E L P P T | |
| CTGCACGCCGACGAGCCGTCGCCGCACGTCGACTGGACGGCCGGCGCCGT | 1450 |
| L H A D E P S P H V D W T A G A V | |
| CGAACTGCTGACGTCGGCCCGGCCGTGGCCCGAGACCGACCGGCCACGGC | 1500 |
| E L L T S A R P W P E T D R P R | |
| GTGCCGCCGTCTCCTCGTTCGGGGTGAGCGGCACCAACGCCCACGTCATC | 1550 |
| R A A V S S F G V S G T N A H V I | |
| CTGGAGGCCGGACCGGTAACGGAGACGCCCGCGGCATCGCCTTCCGGTGA | 1600 |
| L E A G P V T E T P A A S P S G D | |
| CCTTCCCCTGCTGGTGTCGGCACGCTCACCGGAAGCGCTCGACGAGCAGA | 1650 |
| L P L L V S A R S P E A L D E Q | |
| TCCGCCGACTGCGCGCCTACCTGGACACCACCCCGGACGTCGACCGGGTG | 1700 |
| I R R L R A Y L D T T P D V D R V | |
| GCCGTGGCACAGACGCTGGCCCGGCGCACACACTTCGCCCACCGCGCCGT | 1750 |
| A V A Q T L A R R T H F A H R A V | |
| GCTGCTCGGTGACACCGTCATCACCACACCCCCCGCGGACCGGCCCGACG | 1800 |
| L L G D T V I T T P P A D R P D | |
| AACTCGTCTTCGTCTACTCCGGCCAGGGCACCCAGCATCCCGCGATGGGC | 1850 |
| E L V F V Y S G Q G T Q H P A M G | |
| GAGCAGCTAGCCGATTCGTCGGTGGTGTTCGCCGAGCGGATGGCCGAGTG | 1900 |
| E Q L A D S S V V F A E R M A E C | |
| TGCGGCGGCGTTGCGCGAGTTCGTGGACTGGGATCTGTTCACGGTTCTGG | 1950 |
| A A A L R E F V D W D L F T V L | |
| ATGATCCGGCGGTGGTGGACCGGGTTGATGTGGTCCAGCCCGCTTCCTGG | 2000 |
| D D P A V V D R V D V V Q P A S W | |
| GCGATGATGGTTTCCCTGGCCGCGGTGTGGCAGGCGGCCGGTGTGCGGCC | 2050 |
| A M M V S L A A V W Q A A G V R P | |
| GGATGCGGTGATCGGCCATTCGCAGGGTGAGATCGCCGCAGCTTGTGTGG | 2100 |
| D A V I G H S Q G E I A A A C V | |
| CGGGTGCGGTGTCACTACGCGATGCCGCCCGGATCGTGACCTTGCGCAGC | 2150 |
| A G A V S L R D A A R I V T L R S | |
| CAGGCGATCGCCCGGGGCCTGGCGGGCCGGGGCGCGATGGCATCCGTCGC | 2200 |
| Q A I A R G L A G R G A M A S V A | |
| CCTGCCCGCGCAGGATGTCGAGCTGGTCGACGGGGCCTGGATCGCCGCCC | 2250 |
| L P A Q D V E L V D G A W I A A | |
| ACAACGGGCCCGCCTCCACCGTGATCGCGGGCACCCCGGAAGCGGTCGAC | 2300 |
| H N G P A S T V I A G T P E A V D | |
| CATGTCCTCACCGCTCATGAGGCACAAGGGGTGCGGGTGCGGCGGATCAC | 2350 |
| H V L T A H E A Q G V R V R R I T | |
| CGTCGACTATGCCTCGCACACCCCGCACGTCGAGCTGATCCGCGACGAAC | 2400 |
| V D Y A S H T P H V E L I R D E | |
| TACTCGACATCACTAGCGACAGCAGCTCGCAGACCCCGCTCGTGCCGTGG | 2450 |
| L L D I T S D S S S Q T P L V P W | |
| CTGTCGACCGTGGACGGCACCTGGGTCGACAGCCCGCTGGACGGGGAGTA | 2500 |
| L S T V D G T W V D S P L D G E Y | |
| CTGGTACCGGAACCTGCGTGAACCGGTCGGTTTCCACCCCGCCGTCAGCC | 2550 |
| W Y R N L R E P V G F H P A V S | |
| AGTTGCAGGCCCAGGGCGACACCGTGTTCGTCGAGGTCAGCGCCAGCCCG | 2600 |
| Q L Q A Q G D T V F V E V S A S P | |
| GTGTTGTTGCAGGCGATGGACGACGATGTCGTCACGGTTGCCACGCTGCG | 2650 |
| V L L Q A M D D D V V T V A T L R | |
| TCGTGACGACGGCGACGCCACCCGGATGCTCACCGCCCTGGCACAGGCCT | 2700 |
| R D D G D A T R M L T A L A Q A | |
| ATGTCCACGGCGTCACCGTCGACTGGCCCGCCATCCTCGGCACCACCACA | 2750 |
| Y V H G V T V D W P A I L G T T T | |
| ACCCGGGTACTGGACCTTCCGACCTACGCCTTCCAACACCAGCGGTACTG | 2800 |
| T R V L D L P T Y A F Q H Q R Y W | |
| GCTCGAGTCGGCACGCCCGGCCGCATCCGACGCGGGCCACCCCGTGCTGG | 2850 |
| L E S A R P A A S D A G H P V L | |
| GCTCCGGTATCGCCCTCGCCGGGTCGCCGGGCCGGGTGTTCACGGGTTCC | 2900 |
| G S G I A L A G S P G R V F T G S | |
| GTGCCGACCGGTGCGGACCGCGCGGTGTTCGTCGCCGAGCTGGCGCTGGC | 2950 |
| V P T G A D R A V F V A E L A L A | |
| CGCCGCGGACGCGGTCGACTGCGCCACGGTCGAGCGGCTCGACATCGCCT | 3000 |
| A A D A V D C A T V E R L D I A | |
| CCGTGCCCGGCCGGCCGGGCCATGGCCGGACGACCGTACAGACCTGGGTC | 3050 |
| S V P G R P G H G R T T V Q T W V | |
| GACGAGCCGGCGGACGACGGCCGGCGCCGGTTCACCGTGCACACCCGCAC | 3100 |
| D E P A D D G R R R F T V H T R T | |
| CGGCGACGCCCCGTGGACGCTGCACGCCGAGGGGGTGCTGCGCCCCCATG | 3150 |
| G D A P W T L H A E G V L R P H | |
| GCACGGCCCTGCCCGATGCGGCCGACGCCGAGTGGCCCCCACCGGGCGCG | 3200 |
| G T A L P D A A D A E W P P P G A | |
| GTGCCCGCGGACGGGCTGCCGGGTGTGTGGCGCCGGGGGGACCAGGTCTT | 3250 |
| V P A D G L P G V W R R G D Q V F | |
| CGCCGAGGCCGAGGTGGACGGACCGGACGGTTTCGTGGTGCACCCCGACC | 3300 |
| A E A E V D G P D G F V V H P D | |
| TGCTCGACGCGGTCTTCTCCGCGGTCGGCGACGGAAGCCGCCAGCCGGCC | 3350 |
| L L D A V F S A V G D G S R Q P A | |
| GGATGGCGCGACCTGACGGTGCACGCGTCGGACGCCACCGTACTGCGCGC | 3400 |
| G W R D L T V H A S D A T V L R A | |
| CTGCCTCACCCGGCGCACCGACGGAGCCATGGGATTCGCCGCCTTCGACG | 3450 |
| C L T R R T D G A M G F A A F D | |
| GCGCCGGCCTGCCGGTACTCACCGCGGAGGCGGTGACGCTGCGGGAGGTG | 3500 |
| G A G L P V L T A E A V T L R E V | |
| GCGTCACCGTCCGGCTCCGAGGAGTCGGACGGCCTGCACCGGTTGGAGTG | 3550 |
| A S P S G S E E S D G L H R L E W | |
| GCTCGCGGTCGCCGAGGCGGTCTACGACGGTGACCTGCCCGAGGGACATG | 3600 |
| L A V A E A V Y D G D L P E G H | |
| TCCTGATCACCGCCGCCCACCCCGACGACCCCGAGGACATACCCACCCGC | 3650 |
| V L I T A A H P D D P E D I P T R | |
| GCCCACACCCGCGCCACCCGCGTCCTGACCGCCCTGCAACACCACCTCAC | 3700 |
| A H T R A T R V L T A L Q H H L T | |
| CACCACCGACCACACCCTCATCGTCCACACCACCACCGACCCCGCCGGCG | 3750 |
| T T D H T L I V H T T T D P A G | |
| CCACCGTCACCGGCCTCACCCGCACCGCCCAGAACGAACACCCCCACCGC | 3800 |
| A T V T G L T R T A Q N E H P H R | |
| ATCCGCCTCATCGAAACCGACCACCCCCACACCCCCCTCCCCCTGGCCCA | 3850 |
| I R L I E T D H P H T P L P L A Q | |
| ACTCGCCACCCTCGACCACCCCCACCTCCGCCTCACCCACCACACCCTCC | 3900 |
| L A T L D H P H L R L T H H T L | |
| ACCACCCCCACCTCACCCCCCTCCACACCACCACCCCACCCACCACCACC 3950 | |
| H H P H L T P L H T T T P P T T T | |
| CCCCTCAACCCCGAACACGCCATCATCATCACCGGCGGCTCCGGCACCCT | 4000 |
| P L N P E H A I I I T G G S G T L | |
| CGCCGGCATCCTCGCCCGCCACCTGAACCACCCCCACACCTACCTCCTCT | 4050 |
| A G I L A R H L N H P H T Y L L | |
| CCCGCACCCCACCCCCCGACGCCACCCCCGGCACCCACCTCCCCTGCGAC | 4100 |
| S R T P P P D A T P G T H L P C D | |
| GTCGGCGACCCCCACCAACTCGCCACCACCCTCACCCACATCCCCCAACC | 4150 |
| V G D P H Q L A T T L T H I P Q P | |
| CCTCACCGCCATCTTCCACACCGCCGCCACCCTCGACGACGGCATCCTCC | 4200 |
| L T A I F H T A A T L D D G I L | |
| ACGCCCTCACCCCCGACCGCCTCACCACCGTCCTCCACCCCAAAGCCAAC | 4250 |
| H A L T P D R L T T V L H P K A N | |
| GCCGCCTGGCACCTGCACCACCTCACCCAAAACCAACCCCTCACCCACTT | 4300 |
| A A W H L H H L T Q N Q P L T H F | |
| CGTCCTCTACTCCAGCGCCGCCGCCGTCCTCGGCAGCCCCGGACAAGGAA | 4350 |
| V L Y S S A A A V L G S P G Q G | |
| ACTACGCCGCCGCCAACGCCTTCCTCGACGCCCTCGCCACCCACCGCCAC | 4400 |
| N Y A A A N A F L D A L A T H R H | |
| ACCCTCGGCCAACCCGCCACCTCCATCGCCTGGGGCATGTGGCACACCAC | 4450 |
| T L G Q P A T S I A W G M W H T T | |
| CAGCACCCTCACCGGACAACTCGACGACGCCGACCGGGACCGCATCCGCC | 4500 |
| S T L T G Q L D D A D R D R I R | |
| GCGGCGGTTTCCTCCCGATCACGGACGACGAGGGCATGGGGATGCAT | |
| R G G F L P I T D D E G | |

[0212] Phage KC515 DNA was prepared using the procedure described in Genetic Manipulation of Streptomyces, A Laboratory Manual, edited by D. Hopwood et al. A phage suspension prepared from 10 plates (100 mm) of confluent plaques of KC515 on S. lividans TK24 generally gave about 3 μg of phage DNA. The DNA was ligated to circularize at the cos site, subsequently digested with restriction enzymes BamHI and PstI, and dephosphorylated with SAP.

[0213] Each module 8 cassette described above was excised with restriction enzymes BglII and NsiI and ligated into the compatible BamHI and PstI sites of KC515 phage DNA prepared as described above. The ligation mixture containing KC515 and various cassettes was transfected into protoplasts of Streptomyces lividans TK24 using the procedure described in Genetic Manipulation of Streptomyces, A Laboratory Manual edited by D. Hopwood et al. and overlaid with TK24 spores. After 16-24 hr, the plaques were restreaked on plates overlaid with TK24 spores. Single plaques were picked and resuspended in 200 μL of nutrient broth. Phage DNA was prepared by the boiling method (Hopwood et al., supra). The PCR with primers spanning the left and right boundaries of the recombinant phage was used to verify the correct phage had been isolated. In most cases, at least 80% of the plaques contained the expected insert. To confirm the presence of the resistance marker (thiostrepton), a spot test is used, as described in Lomovskaya et al. (1997), in which a plate with spots of phage is overlaid with mixture of spores of TK24 and phiC31 TK24 lysogen. After overnight incubation, the plate is overlaid with antibiotic in soft agar. A working stock is made of all phage containing desired constructs.

[0214] Streptomyces hygroscopicus ATCC 14891 (see U.S. Pat. No. 3,244,592, issued 5 Apr. 1966, incorporated herein by reference) mycelia were infected with the recombinant phage by mixing the spores and phage (1×10⁸ of each), and incubating on R2YE agar (Genetic Manipulation of Streptomyces, A Laboratory Manual, edited by D. Hopwood et al.) at 30° C. for 10 days. Recombinant clones were selected and plated on minimal medium containing thiostrepton (50 μg/ml) to select for the thiostrepton resistance-conferring gene. Primary thiostrepton resistant clones were isolated and purified through a second round of single colony isolation, as necessary. To obtain thiostrepton-sensitive revertants that underwent a second recombination event to evict the phage genome, primary recombinants were propagated in liquid media for two to three days in the absence of thiostrepton and then spread on agar medium without thiostrepton to obtain spores. Spores were plated to obtain about 50 colonies per plate, and thiostrepton sensitive colonies were identified by replica plating onto thiostrepton containing agar medium. The PCR was used to determine which of the thiostrepton sensitive colonies reverted to the wild type (reversal of the initial integration event), and which contain the desired AT swap at module 8 in the ATCC 14891-derived cells. The PCR primers used amplified either the KS/AT junction or the AT/DH junction of the wild-type and the desired recombinant strains. Fermentation of the recombinant strains, followed by isolation of the metabolites and analysis by LCMS, and NMR is used to characterize the novel polyketide compounds.

### EXAMPLE 2

### Replacement of Methoxyl with Hydrogen or Methyl at C-13 of FK-506

[0215] The present invention also provides the 13-desmethoxy derivatives of FK-506 and the novel PKS enzymes that produce them. A variety of Streptomyces strains that produce FK-506 are known in the art, including S. tsukubaensis No. 9993 (FERM BP-927), described in U.S. Pat. No. 5,624,852, incorporated herein by reference; S. hygroscopicus subsp. yakushimaensis No. 7238, described in U.S. Pat. No. 4,894,366, incorporated herein by reference; S. sp. MA6858 (ATCC 55098), described in U.S. Pat. No. 5,116,756, incorporated herein by reference; and S. sp. MA 6548, described in Motamedi et al., 1998, “The biosynthetic gene cluster for the macrolactone ring of the immunosuppressant FK-506,” Eur. J. Biochem. 256: 528-534, and Motamedi et al., 1997, “Structural organization of a multifunctional polyketide synthase involved in the biosynthesis of the macrolide immunosuppressant FK-506,” Eur. J. Biochem. 244: 74-80, each of which is incorporated herein by reference.

[0216] The complete sequence of the FK-506 gene cluster from Streptomyces sp. MA6548 is known, and the sequences of the corresponding gene clusters from other FK-506-producing organisms is highly homologous thereto. The novel FK-506 recombinant gene clusters of the present invention differ from the naturally occurring gene clusters in that the AT domain of module 8 of the naturally occurring PKSs is replaced by an AT domain specific for malonyl CoA or methylmalonyl CoA. These AT domain replacements are made at the DNA level, following the methodology described in Example 1.

[0217] The naturally occurring module 8 sequence for the MA6548 strain is shown below, followed by the illustrative hybrid module 8 sequences for the MA6548 strains (SEQ ID NOS:24-25).

| | |
|---|---|
| GCATGCGGCTGTACGAGGCGGCACGGCGCACCGGAAGTCCCGTGGTGGTG | 50 |
| M R L Y E A A R R T G S P V V V | |
| GCGGCCGCGCTCGACGACGCGCCGGACGTGCCGCTGCTGCGCGGGCTGCG | 100 |
| A A A L D D A P D V P L L R G L R | |
| GCGTACGACCGTCCGGCGTGCCGCCGTCCGGGAACGCTCTCTCGCCGACC | 150 |
| R T T V R R A A V R E R S L A D | |
| GCTCGCCGTGCTGCCCGACGACGAGCGCGCCGACGCCTCCCTCGCGTTCG | 200 |
| R S P C C P T T S A P T P P S R S | |
| TCCTGGAACAGCACCGCCACCGTGCTCGGCCACCTGGGCGCCGAAGACAT | 250 |
| S W N S T A T V L G H L G A E D I | |
| CCCGGCGACGACGACGTTCAAGGAACTCGGCATCGACTCGCTCACCGCGG | 300 |
| P A T T T F K E L G I D S L T A | |
| TCCAGCTGCGCAACGCGCTGACCACGGCGACCGGCGTACGCCTCAACGCC | 350 |
| V Q L R N A L T T A T G V R L N A | |
| ACAGCGGTCTTCGACTTTCCGACGCCGCGCGCGCTCGCCGCGAGACTCGG | 400 |
| T A V F D F P T P R A L A A R L G | |
| CGACGAGCTGGCCGGTACCCGCGCGCCCGTCGCGGCCCGGACCGCGGCCA | 450 |
| D E L A G T R A P V A A R T A A | |
| CCGCGGCCGCGCACGACGAACCGCTGGCGATCGTGGGCATGGCCTGCCGT | 500 |
| T A A A H D E P L A I V G M A C R | |
| CTGCCGGGCGGGGTCGCGTCGCCACAGGAGCTGTGGCGTCTCGTCGCGTC | 550 |
| L P G G V A S P Q E L W R L V A S | |
| CGGCACCGACGCCATCACGGAGTTCCCCGCGGACCGCGGCTGGGACGTGG | 600 |
| G T D A I T E F P A D R G W D V | |
| ACGCGCTCTACGACCCGGACCCCGACGCGATCGGCAAGACCTTCGTCCGG | 650 |
| D A L Y D P D P D A I G K T F V R | |
| CACGGCGGCTTCCTCGACGGTGCGACCGGCTTCGACGCGGCGTTCTTCGG | 700 |
| H G G F L D G A T G F D A A F F G | |
| GATCAGCCCGCGCGAGGCCCTGGCCATGGACCCGCAGCAACGGGTGCTCC | 750 |
| I S P R E A L A M D P Q Q R V L | |
| TGGAGACGTCCTGGGAGGCGTTCGAAAGCGCGGGCATCACCCCGGACGCG | 800 |
| L E T S W E A F E S A G I T P D A | |
| GCGCGGGGCAGCGACACCGGCGTGTTCATCGGCGCGTTCTCCTACGGGTA | 850 |
| A R G S D T G V F I G A F S Y G Y | |
| CGGCACGGGTGCGGATACCAACGGCTTCGGCGCGACAGGGTCGCAGACCA | 900 |
| G T G A D T N G F G A T G S Q T | |
| GCGTGCTCTCCGGCCGCCTCTCGTACTTCTACGGTCTGGAGGGCCCTTCG | 950 |
| S V L S G R L S Y F Y G L E G P S | |
| GTCACGGTCGACACCGCCTGCTCGTCGTCACTGGTCGCCCTGCACCAGGC | 1000 |
| V T V D T A C S S S L V A L H Q A | |
| AGGGCAGTCCCTGCGCTCGGGCGAATGCTCGCTCGCCCTGGTCGGCGGTG | 1050 |
| G Q S L R S G E C S L A L V G G | |
| TCACGGTGATGGCGTCGCCCGGCGGATTCGTCGAGTTCTCCCGGCAGCGC | 1100 |
| V T V M A S P G G F V E F S R Q R | |
| GGGCTCGCGCCGGACGGGCGGGCGAAGGCGTTCGGCGCGGGCGCGGACGG | 1150 |
| G L A P D G R A K A F G A G A D G | |
| TACGAGCTTCGCCGAGGGCGCCGGTGCCCTGGTGGTCGAGCGGCTCTCCG | 1200 |
| T S F A E G A G A L V V E R L S | |
| ACGCGGAGCGCCACGGCCACACCGTCCTCGCCCTCGTACGCGGCTCCGCG | 1250 |
| D A E R H G H T V L A L V R G S A | |
| GCTAACTCCGACGGCGCGTCGAACGGTCTGTCGGCGCCGAACGGCCCCTC | 1300 |
| A N S D G A S N G L S A P N G P S | |
| CCAGGAACGCGTCATCCACCAGGCCCTCGCGAACGCGAAACTCACCCCCG | 1350 |
| Q E R V I H Q A L A N A K L T P | |
| CCGATGTCGACGCGGTCGAGGCGCACGGCACCGGCACCCGCCTCGGCGAC | 1400 |
| A D V D A V E A H G T G T R L G D | |
| CCCATCGAGGCGCAGGCGCTGCTCGCGACGTACGGACAGGACCGGGCGAC | 1450 |
| P I E A Q A L L A T Y G Q D R A T | |
| GCCCCTGCTGCTCGGCTCGCTGAAGTCGAACATCGGGCACGCCCAGGCCG | 1500 |
| P L L L G S L K S N I G H A Q A | |
| CGTCAGGGGTCGCCGGGATCATCAAGATGGTGCAGGCCATCCGGCACGGG | 1550 |
| A S G V A G I I K M V Q A I R H G | |
| GAACTGCCGCCGACACTGCACGCGGACGAGCCGTCGCCGCACGTCGACTG | 1600 |
| E L P P T L H A D E P S P H V D W | |
| GACGGCCGGTGCCGTCGAGCTCCTGACGTCGGCCCGGCCGTGGCCGGGGA | 1650 |
| T A G A V E L L T S A R P W P G | |
| CCGGTCGCCCGCGCCGCGCTGCCGTCTCGTCGTTCGGCGTGAGCGGCACG | 1700 |
| T G R P R R A A V S S F G V S G T | |
| AACGCCCACATCATCCTTGAGGCAGGACCGGTCAAAACGGGACCGGTCGA | 1750 |
| N A H I I L E A G P V K T G P V E | |
| GGCAGGAGCGATCGAGGCAGGACCGGTCGAAGTAGGACCGGTCGAGGCTG | 1800 |
| A G A I E A G P V E V G P V E A | |
| GACCGCTCCCCGCGGCGCCGCCGTCAGCACCGGGCGAAGACCTTCCGCTG | 1850 |
| G P L P A A P P S A P G E D L P L | |
| CTCGTGTCGGCGCGTTCCCCGGAGGCACTCGACGAGCAGATCGGGCGCCT | 1900 |
| L V S A R S P E A L D E Q I G R L | |
| GCGCGCCTATCTCGACACCGGCCCGGGCGTCGACCGGGCGGCCGTGGCGC | 1950 |
| R A Y L D T G P G V D R A A V A | |
| AGACACTGGCCCGGCGTACGCACTTCACCCACCGGGCCGTACTGCTCGGG | 2000 |
| Q T L A R R T H F T H R A V L L G | |
| GACACCGTCATCGGCGCTCCCCCCGCGGACCAGGCCGACGAACTCGTCTT | 2050 |
| D T V I G A P P A D Q A D E L V F | |
| CGTCTACTCCGGTCAGGGCACCCAGCATCCCGCGATGGGCGAGCAACTCG | 2100 |
| V Y S G Q G T Q H P A M G E Q L | |
| CGGCCGCGTTCCCCGTGTTCGCCGATGCCTGGCACGACGCGCTCCGACGG | 2150 |
| A A A F P V F A D A W H D A L R R | |
| CTCGACGACCCCGACCCGCACGACCCCACACGGAGCCAGCACACGCTCTT | 2200 |
| L D D P D P H D P T R S Q H T L F | |
| CGCCCACCAGGCGGCGTTCACCGCCCTCCTGAGGTCCTGGGACATCACGC | 2250 |
| L D V A Q R L G I H H R L P A P | |
| CGCACGCCGTCATCGGCCACTCGCTCGGCGAGATCACCGCCGCGTACGCC | 2300 |
| P H A V I G H S L G E I T A A Y A | |
| GCCGGGATCCTGTCGCTCGACGACGCCTGCACCCTGATCACCACGCGTGC | 2350 |
| A G I L S L D D A C T L I T T R A | |
| CCGCCTCATGCACACGCTTCCGCCGCCCGGCGCCATGGTCACCGTGCTGA | 2400 |
| R L M H T L P P P G A M V T V L | |
| CCAGCGAGGAGGAGGCCCGTCAGGCGCTGCGGCCGGGCGTGGAGATCGCC | 2450 |
| T S E E E A R Q A L R P G V E I A | |
| GCGGTCTTCGGCCCGCACTCCGTCGTGCTCTCGGGCGACGAGGACGCCGT | 2500 |
| A V F G P H S V V L S G D E D A V | |
| GCTCGACGTCGCACAGCGGCTCGGCATCCACCACCGTCTGCCCGCGCCGC | 2550 |
| L D V A Q R L G I H H R L P A P | |
| ACGCGGGCCACTCCGCGCACATGGAACCCGTGGCCGCCGAGCTGCTCGCC | 2600 |
| H A G H S A H M E P V A A E L L A | |
| ACCACTCGCGAGCTCCGTTACGACCGGCCCCACACCGCCATCCCGAACGA | 2650 |
| T T R E L R Y D R P H T A I P N D | |
| CCCCACCACCGCCGAGTACTGGGCCGAGCAGGTCCGCAACCCCGTGCTGT | 2700 |
| P T T A E Y W A E Q V R N P V L | |
| TCCACGCCCACACCCAGCGGTACCCCGACGCCGTGTTCGTCGAGATCGGC | 2750 |
| F H A H T Q R Y P D A V F V E I G | |
| CCCGGCCAGGACCTCTCACCGCTGGTCGACGGCATCGCCCTGCAGAACGG | 2800 |
| P G Q D L S P L V D G I A L Q N G | |
| CACGGCGGACGAGGTGCACGCGCTGCACACCGCGCTCGCCCGCCTCTTCA | 2850 |
| T A D E V H A L H T A L A R L F | |
| CACGCGGCGCCACGCTCGACTGGTCCCGCATCCTCGGCGGTGCTTCGCGG | 2900 |
| T R G A T L D W S R I L G G A S R | |
| CACGACCCTGACGTCCCCTCGTACGCGTTCCAGCGGCGTCCCTACTGGAT | 2950 |
| H D P D V P S Y A F Q R R P Y W I | |
| CGAGTCGGCTCCCCCGGCCACGGCCGACTCGGGCCACCCCGTCCTCGGCA | 3000 |
| E S A P P A T A D S G H P V L G | |
| CCGGAGTCGCCGTCGCCGGGTCGCCGGGCCGGGTGTTCACGGGTCCCGTG | 3050 |
| T G V A V A G S P G R V F T G P V | |
| CCCGCCGGTGCGGACCGCGCGGTGTTCATCGCCGAACTGGCGCTCGCCGC | 3100 |
| P A G A D R A V F I A E L A L A A | |
| CGCCGACGCCACCGACTGCGCCACGGTCGAACAGCTCGACGTCACCTCCG | 3150 |
| A D A T D C A T V E Q L D V T S | |
| TGCCCGGCGGATCCGCCCGCGGCAGGGCCACCGCGCAGACCTGGGTCGAT | 3200 |
| V P G G S A R G R A T A Q T W V D | |
| GAACCCGCCGCCGACGGGCGGCGCCGCTTCACCGTCCACACCCGCGTCGG | 3250 |
| E P A A D G R R R G T V H T R V G | |
| CGACGCCCCGTGGACGCTGCACGCCGAGGGGGTTCTCCGCCCCGGCCGCG | 3300 |
| D A P W T L H A E G V L R P G R | |
| TGCCCCAGCCCGAAGCCGTCGACACCGCCTGGCCCCCGCCGGGCGCGGTG | 3350 |
| V P Q P E A V D T A W P P P G A V | |
| CCCGCGGACGGGCTGCCCGGGGCGTGGCGACGCGCGGACCAGGTCTTCGT | 3400 |
| P A D G L P G A W R R A D Q V F V | |
| CGAAGCCGAAGTCGACAGCCCTGACGGCTTCGTGGCACACCCCGACCTGC | 3450 |
| E A E V D S P D G F V A H P D L | |
| TCGACGCGGTCTTCTCCGCGGTCGGCGACGGGAGCCGCCAGCCGACCGGA | 3500 |
| L D A V F S A V G D G S R Q O T G | |
| TGGCGCGACCTCGCGGTGCACGCGTCGGACGCCACCGTGCTGCGCGCCTG | 3550 |
| W R D L A V H A S D A T V L R A C | |
| CCTCACCCGCCGCGACAGTGGTGTCGTGGAGCTCGCCGCCTTCGACGGTG | 3600 |
| L T R R D S G V V E L A A F D G | |
| CCGGAATGCCGGTGCTCACCGCGGAGTCGGTGACGCTGGGCGAGGTCGCG | 3650 |
| A G M P V L T A E S V T L G E V A | |
| TCGGCAGGCGGATCCGACGAGTCGGACGGTCTGCTTCGGCTTGAGTGGTT | 3700 |
| S A G G S D E S D G L L R L E W L | |
| GCCGGTGGCGGAGGCCCACTACGACGGTGCCGACGAGCTGCCCGAGGGCT | 3750 |
| P V A E A H Y D G A D E L P E G | |
| ACACCCTCATCACCGCCACACACCCCGACGACCCCGACGACCCCACCAAC | 3800 |
| Y T L I T A T H P D D P D D P T N | |
| CCCCACAACACACCCACACGCACCCACACACAAACCACACGCGTCCTCAC | 3850 |
| P H N T P T R T H T Q T T R V L T | |
| CGCCCTCCAACACCACCTCATCACCACCAACCACACCCTCATCGTCCACA | 3900 |
| A L Q H H L I T T N H T L I V H | |
| CCACCACCGACCCCCCAGGCGCCGCCGTCACCGGCCTCACCCGCACCGCA | 3950 |
| T T T D P P G A A V T G L T R T A | |
| CAAAACGAACACCCCGGCCGCATCCACCTCATCGAAACCCACCACCCCCA | 4000 |
| Q N E H P G R I H L I E T H H P H | |
| CACCCCACTCCCCCTCACCCAACTCACCACCCTCCACCAACCCCACCTAC | 4050 |
| T P L P L T Q L T T L H Q P H L | |
| GCCTCACCAACAACACCCTCCACACCCCCCACCTCACCCCCATCACCACC | 4100 |
| R L T N N T L H T P H L T P I T T | |
| CACCACAACACCACCACAACCACCCCCAACACCCCACCCCTCAACCCCAA | 4150 |
| H H N T T T T T P N T P P L N P N | |
| CCACGCCATCCTCATCACCGGCGGCTCCGGCACCCTCGCCGGCATCCTCG | 4200 |
| H A I L I T G G S G T L A G I L | |
| CCCGCCACCTCAACCACCCCCACACCTACCTCCTCTCCCGCACACCACCA | 4250 |
| A R H L N H P H T Y L L S R T P P | |
| CCCCCCACCACACCCGGCACCCACATCCCCTGCGACCTCACCGACCCCAC | 4300 |
| P P T T P H T H I P C D L T D P T | |
| CCAAATCACCCAAGCCCTCACCCACATACCACAACCCCTCACCGGCATCT | 4350 |
| Q I T Q A L T H I P Q P L T G I | |
| TCCACACCGCCGCCACCCTCGACGACGCCACCCTCACCAACCTCACCCCC | 4400 |
| F H T A A T L D D A T L T N L T P | |
| CAACACCTCACCACCACCCTCCAACCCAAAGCCGACGCCGCCTGGCACCT | 4450 |
| Q H L T T T L Q P K A D A A W H L | |
| CCACCACCACACCCAAAACCAACCCCTCACCCACTTCGTCCTCTACTCCA | 4500 |
| H H H T Q N Q P L T H F V L Y S | |
| GCGCCGCCGCCACCCTCGGCAGCCCCGGCCAAGCCAACTACGCCGCCGCC | 4550 |
| S A A A T L G S P G Q A N Y A A A | |
| AACGCCTTCCTCGACGCCCTCGCCACCCACCGCCACACCCAAGGACAACC | 4600 |
| N A F L D A L A T H R H T Q G Q P | |
| CGCCACCACCATCGCCTGGGGCATGTGGCACACCACCACCACACTCACCA | 4650 |
| A T T I A W G M W H T T T T L T | |
| GCCAACTCACCGACAGCGACCGCGACCGCATCCGCCGCGGCGGCTTCCTG | 4700 |
| S Q L T D S D R D R I R R G G F L | |
| CCGATCTCGGACGACGAGGGCATGC | |
| P I S D D E G M | |

[0218] The AvrII-XhoI hybrid FK-506 PKS module 8 containing the AT domain of module 12 of rapamycin is shown below (SEQ ID NOS:26-27).

| | |
|---|---|
| GCATGCGGCTGTACGAGGCGGCACGGCGCACCGGAAGTCCCGTGGTGGTG | 50 |
| M R L Y E A A R R T G S P V V V | |
| GCGGCCGCGCTCGACGACGCGCCGGACGTGCCGCTGCTGCGCGGGCTGCG | 100 |
| A A A L D D A P D V P L L R G L R | |
| GCGTACGACCGTCCGGCGTGCCGCCGTCCGGGAACGCTCTCTCGCCGACC | 150 |
| R T T V R R A A V R E R S L A D | |
| GCTCGCCGTGCTGCCCGACGACGAGCGCGCCGACGCCTCCCTCGCGTTCG | 200 |
| R S P C C P T T S A P T P P S R S | |
| TCCTGGAACAGCACCGCCACCGTGCTCGGCCACCTGGGCGCCGAAGACAT | 250 |
| S W N S T A T V L G H L G A E D I | |
| CCCGGCGACGACGACGTTCAAGGAACTCGGCATCGACTCGCTCACCGCGG | 300 |
| P A T T T F K E L G I D S L T A | |
| TCCAGCTGCGCAACGCGCTGACCACGGCGACCGGCGTACGCCTCAACGCC | 350 |
| V Q L R N A L T T A T G V R L N A | |
| ACAGCGGTCTTCGACTTTCCGACGCCGCGCGCGCTCGCCGCGAGACTCGG | 400 |
| T A V F D F P T P R A L A A R L G | |
| CGACGAGCTGGCCGGTACCCGCGCGCCCGTCGCGGCCCGGACCGCGGCCA | 450 |
| D E L A G T R A P V A A R T A A | |
| CCGCGGCCGCGCACGACGAACCGCTGGCGATCGTGGGCATGGCCTGCCGT | 500 |
| T A A A H D E P L A I V G M A C R | |
| CTGCCGGGCGGGGTCGCGTCGCCACAGGAGCTGTGGCGTCTCGTCGCGTC | 550 |
| L P G G V A S P O E L W R L V A S | |
| CGGCACCGACGCCATCACGGAGTTCCCCGCGGACCGCGGCTGGGACGTGG | 600 |
| G T D A I T E F P A D R G W D V | |
| ACGCGCTCTACGACCCGGACCCCGACGCGATCGGCAAGACCTTCGTCCGG | 650 |
| D A L Y D P D P D A I G K T F V R | |
| CACGGCGGCTTCCTCGACGGTGCGACCGGCTTCGACGCGGCGTTCTTCGG | 700 |
| H G G F L D G A T G F D A A F F G | |
| GATCAGCCCGCGCGAGGCCCTGGCCATGGACCCGCAGCAACGGGTGCTCC | 750 |
| I S P R E A L A M D P Q Q R V L | |
| TGGAGACGTCCTGGGAGGCGTTCGAAAGCGCGGGCATCACCCCGGACGCG | 800 |
| L E T S W E A F E S A G I T P D A | |
| GCGCGGGGCAGCGACACCGGCGTGTTCATCGGCGCGTTCTCCTACGGGTA | 850 |
| A R G S D T G V F I G A F S Y G Y | |
| CGGCACGGGTGCGGATACCAACGGCTTCGGCGCGACAGGGTCGCAGACCA | 900 |
| G T G A D T N G F G A T G S Q T | |
| GCGTGCTCTCCGGCCGCCTCTCGTACTTCTACGGTCTGGAGGGCCCTTCG | 950 |
| S V L S G R L S Y F Y G L E G P S | |
| GTCACGGTCGACACCGCCTGCTCGTCGTCACTGGTCGCCCTGCACCAGGC | 1000 |
| V T V D T A C S S S L V A L H Q A | |
| AGGGCAGTCCCTGCGCTCGGGCGAATGCTCGCTCGCCCTGGTCGGCGGTG | 1050 |
| G Q S L R S G E C S L A L V G G | |
| TCACGGTGATGGCGTCGCCCGGCGGATTCGTCGAGTTCTCCCGGCAGCGC | 1100 |
| V T V M A S P G G F V E F S R Q R | |
| GGGCTCGCGCCGGACGGGCGGGCGAAGGCGTTCGGCGCGGGCGCGGACGG | 1150 |
| G L A P D G R A K A F G A G A D G | |
| TACGAGCTTCGCCGAGGGCGCCGGTGCCCTGGTGGTCGAGCGGCTCTCCG | 1200 |
| T S F A E G A G A L V V E R L S | |
| ACGCGGAGCGCCACGGCCACACCGTCCTCGCCCTCGTACGCGGCTCCGCG | 1250 |
| D A E R H G H T V L A L V R G S A | |
| GCTAACTCCGACGGCGCGTCGAACGGTCTGTCGGCGCCGAACGGCCCCTC | 1300 |
| A N S D G A S N G L S A P N G P S | |
| CCAGGAACGCGTCATCCACCAGGCCCTCGCGAACGCGAAACTCACCCCCG | 1350 |
| Q E R V I H Q A L A N A K L T P | |
| CCGATGTCGACGCGGTCGAGGCGCACGGCACCGGCACCCGCCTCGGCGAC | 1400 |
| A D V D A V E A H G T G T R L G D | |
| CCCATCGAGGCGCAGGCGCTGCTCGCGACGTACGGACAGGACCGGGCGAC | 1450 |
| P I E A Q A L L A T Y G Q D R A T | |
| GCCCCTGCTGCTCGGCTCGCTGAAGTCGAACATCGGGCACGCCCAGGCCG | 1500 |
| P L L L G S L K S N I G H A Q A | |
| CGTCAGGGGTCGCCGGGATCATCAAGATGGTGCAGGCCATCCGGCACGGG | 1550 |
| A S G V A G I I K M V Q A I R H G | |
| GAACTGCCGCCGACACTGCACGCGGACGAGCCGTCGCCGCACGTCGACTG | 1600 |
| E L P P T L H A D E P S P H V D W | |
| GACGGCCGGTGCCGTCGAGCTCCTGACGTCGGCCCGGCCGTGGCCGGGGA | 1650 |
| T A G A V E L L T S A R P W P G | |
| CCGGTCGCCCTAGGCGGGCAGGCGTGTCGTCCTTCGGGATCAGTGGCACC | 1700 |
| T G R P R R A A V S S F G V S G T | |
| AACGCCCACGTCATCCTGGAAAGCGCACCCCCCACTCAGCCTGCGGACAA | 1750 |
| N A H V I L E S A P P T Q P A D N | |
| CGCGGTGATCGAGCGGGCACCGGAGTGGGTGCCGTTGGTGATTTCGGCCA | 1800 |
| A V I E R A P E W V P L V I S A | |
| GGACCCAGTCGGCTTTGACTGAGCACGAGGGCCGGTTGCGTGCGTATCTG | 1850 |
| R T Q S A L T E H E G R L R A Y L | |
| GCGGCGTCGCCCGGGGTGGATATGCGGGCTGTGGCATCGACGCTGGCGAT | 1900 |
| A A S P G V D M R A V A S T L A M | |
| GACACGGTCGGTGTTCGAGCACCGTGCCGTGCTGCTGGGAGATGACACCG | 1950 |
| T R S V F E H R A V L L G D D T | |
| TCACCGGCACCGCTGTGTCTGACCCTCGGGCGGTGTTCGTCTTCCCGGGA | 2000 |
| V T F T A V S D P R A V F V F P G | |
| CAGGGGTCGCAGCGTGCTGGCATGGGTGAGGAACTGGCCGCCGCGTTCCC | 2050 |
| Q G S Q R A G M G E E L A A A F P | |
| CGTCTTCGCGCGGATCCATCAGCAGGTGTGGGACCTGCTCGATGTGCCCG | 2100 |
| V F A R I H Q Q V W D L L D V P | |
| ATCTGGAGGTGAACGAGACCGGTTACGCCCAGCCGGCCCTGTTCGCAATG | 2150 |
| D L E V N E T G Y A Q P A L F A M | |
| CAGGTGGCTCTGTTCGGGCTGCTGGAATCGTGGGGTGTACGACCGGACGC | 2200 |
| Q V A L F G L L E S W G V R P D A | |
| GGTGATCGGCCATTCGGTGGGTGAGCTTGCGGCTGCGTATGTGTCCGGGG | 2250 |
| V I G H S V G E L A A A Y V S G | |
| TGTGGTCGTTGGAGGATGCCTGCACTTTGGTGTCGGCGCGGGCTCGTCTG | 2300 |
| V W S L E D A C T L V S A R A R L | |
| ATGCAGGCTCTGCCCGCGGGTGGGGTGATGGTCGCTGTCCCGGTCTCGGA | 2350 |
| M Q A L P A G G V M V A V F V S E | |
| GGATGAGGCCCGGGCCGTGCTGGGTGAGGGTGTGGAGATCGCCGCGGTCA | 2400 |
| D E A R A V L G E G V E I A A V | |
| ACGGCCCGTCGTCGGTGGTTCTCTCCGGTGATGAGGCCGCCGTGCTGCAG | 2450 |
| N G P S S V V L S G D E A A V L Q | |
| GCCGCGGAGGGGCTGGGGAAGTGGACGCGGCTGGCGACCAGCCACGCGTT | 2500 |
| A A E G L G K W T R L A T S H A F | |
| CCATTCCGCCCGTATGGAACCCATGCTGGAGGAGTTCCGGGCGGTCGCCG | 2550 |
| H S A R M E P M L E E F R A V A | |
| AAGGCCTGACCTACCGGACGCCGCAGGTCTCCATGGCCGTTGGTGATCAG | 2600 |
| E G L T Y R T P Q V S M A V G D Q | |
| GTGACCACCGCTGAGTACTGGGTGCGGCAGGTCCGGGACACGGTCCGGTT | 2650 |
| V T T A E Y W V R Q V R D T V R F | |
| CGGCGAGCAGGTGGCCTCGTACGAGGACGCCGTGTTCGTCGAGCTGGGTG | 2700 |
| G E Q V A S Y E D A V F V E L G | |
| CCGACCGGTCACTGGCCCGCCTGGTCGACGGTGTCGCGATGCTGCACGGC | 2750 |
| A D R S L A R L V D G V A M L H G | |
| GACCACGAAATCCAGGCCGCGATCGGCGCCCTGGCCCACCTGTATGTCAA | 2800 |
| D H E I Q A A I G A L A H L Y V N | |
| CGGCGTCACGGTCGACTGGCCCGCGCTCCTGGGCGATGCTCCGGCAAcAC | 2850 |
| G V T V D W P A L L G D A P A T | |
| GGGTGCTGGACCTTCCGACATACGCCTTCCAGCACCAGCGCTACTGGCTC | 2900 |
| R V L D L P T Y A F Q H Q R Y W L | |
| GAGTCGGCTCCCCCGGCCACGGCCGACTCGGGCCACCCCGTCCTCGGCAC | 2950 |
| E S A P P A T A D S G H P V L G T | |
| CGGAGTCGCCGTCGCCGGGTCGCCGGGCCGGGTGTTCACGGGTCCCGTGC | 3000 |
| G V A U A G S P G R V F T G P V | |
| CCGCCGGTGCGGACCGCGCGGTGTTCATCGCCGAACTGGCGCTCGCCGCC | 3050 |
| P A G A D R A V F I A E L A L A A | |
| GCCGACGCCACCGACTGCGCCACGGTCGAACAGCTCGACGTCACCTCCGT | 3100 |
| A D A T D C A T V E Q L D V T S V | |
| GCCCGGCGGATCCGCCCGCGGCAGGGCCACCGCGCAGACCTGGGTCGATG | 3150 |
| P G G S A R G R A T A Q T W V D | |
| AACCCGCCGCCGACGGGCGGCGCCGCTTCACCGTCCACACCCGCGTCGGC | 3200 |
| E P A A D G R R R F T V H T R V G | |
| GACGCCCCGTGGACGCTGCACGCCGAGGGGGTTCTCCGCCCCGGCCGCGT | 3250 |
| D A P W T L H A E G V L R P G R V | |
| GCCCCAGCCCGAAGCCGTCGACACCGCCTGGCCCCCGCCGGGCGCGGTGC | 3300 |
| P Q P E A V D T A W P P P G A V | |
| CCGCGGACGGGCTGCCCGGGGCGTGGCGACGCGCGGACCAGGTCTTCGTC | 3350 |
| P A D G L P G A W R R A D Q V F V | |
| GAAGCCGAAGTCGACAGCCCTGACGGCTTCGTGGCACACCCCGACCTGCT | 3400 |
| E A E V D S P D G F V A H P D L L | |
| CGACGCGGTCTTCTCCGCGGTCGGCGACGGGAGCCGCCAGCCGACCGGAT | 3450 |
| D A V F S A V G D G S R Q P T G | |
| GGCGCGACCTCGCGGTGCACGCGTCGGACGCCACCGTGCTGCGCGCCTGC | 3500 |
| W R D L A V H A S D A T V L R A C | |
| CTCACCCGCCGCGACAGTGGTGTCGTGGAGCTCGCCGCCTTCGACGGTGC | 3550 |
| L T R R D S G V V E L A A F D G A | |
| CGGAATGCCGGTGCTCACCGCGGAGTCGGTGACGCTGGGCGAGGTCGCGT | 3600 |
| G M P V L T A E S V T L G E V A | |
| CGGCAGGCGGATCCGACGAGTCGGACGGTCTGCTTCGGCTTGAGTGGTTG | 3650 |
| S A G G S D E S D G L L R L E W L | |
| CCGGTGGCGGAGGCCCACTACGACGGTGCCGACGAGCTGCCCGAGGGCTA | 3700 |
| P V A E A H Y D G A D E L P E G Y | |
| CACCCTCATCACCGCCACACACCCCGACGACCCCGACGACCCCACCAACC | 3750 |
| T L I T A T H P D D P D D P T N | |
| CCCACAACACACCCACACGCACCCACACACAAACCACACGCGTCCTCACC | 3800 |
| P H N T P T R T H T Q T T R V L T | |
| GCCCTCCAACACCACCTCATCACCACCAACCACACCCTCATCGTCCACAC | 3850 |
| A L Q H H L I T T N H T L I V H T | |
| CACCACCGACCCCCCAGGCGCCGCCGTCACCGGCCTCACCCGCACCGCAC | 3900 |
| T T D P P G A A V T G L T R T A | |
| AAAACGAACACCCCGGCCGCATCCACCTCATCGAAACCCACCACCCCCAC | 3950 |
| Q N E H P G R I H L I E T H H P H | |
| ACCCCACTCCCCCTCACCCAACTCACCACCCTCCACCAACCCCACCTACG | 4000 |
| T P L P L T Q L T T L H Q P H L R | |
| CCTCACCAACAACACCCTCCACACCCCCCACCTCACCCCCATCACCACCC | 4050 |
| L T N N T L H T P H L T P I T T | |
| ACCACAACACCACCACAACCACCCCCAACACCCCACCCCTCAACCCCAAC | 4100 |
| H H N T T T T T P N T P P L N P N | |
| CACGCCATCCTCATCACCGGCGGCTCCGGCACCCTCGCCGGCATCCTCGC | 4150 |
| H A I L I T G G S G T L A G I L A | |
| CCGCCACCTCAACCACCCCCACACCTACCTCCTCTCCCGCACACCACCAC | 4200 |
| R H L N H P H T Y L L S R T P P | |
| CCCCCACCACACCCGGCACCCACATCCCCTGCGACCTCACCGACCCCACC | 4250 |
| P P T T P G T H I P C D L T D P T | |
| CAAATCACCCAAGCCCTCACCCACATACCACAACCCCTCACCGGCATCTT | 4300 |
| Q I T Q A L T H I P Q P L T G I F | |
| CCACACCGCCGCCACCCTCGACGACGCCACCCTCACCAACCTCACCCCCC | 4350 |
| H T A A T L D D A T L T N L T P | |
| AACACCTCACCACCACCCTCCAACCCAAAGCCGACGCCGCCTGGCACCTC | 4400 |
| A H L T T T L Q P K A D A A W H L | |
| CACCACCACACCCAAAACCAACCCCTCACCCACTTCGTCCTCTACTCCAG | 4450 |
| H H H T Q N Q P L T H F V L Y S S | |
| CGCCGCCGCCACCCTCGGCAGCCCCGGCCAAGCCAACTACGCCGCCGCCA | 4500 |
| A A A T L G S P G Q A N Y A A A | |
| ACGCCTTCCTCGACGCCCTCGCCACCCACCGCCACACCCAAGGACAACCC | 4550 |
| N A F L D A L A T H R H T Q G Q P | |
| GCCACCACCATCGCCTGGGGCATGTGGCACACCACCACCACACTCACCAG | 4600 |
| A T T I A W G M W H T T T T L T S | |
| CCAACTCACCGACAGCGACCGCGACCGCATCCGCCGCGGCGGCTTCCTGC | 4650 |
| Q L T D S D R D R I R R G G F L | |
| CGATCTCGGACGACGAGGGCATGC | |
| P I S D D E G M | |

[0219] The AvrII-XhoI hybrid FK-506 PKS module 8 containing the AT domain of module 13 of rapamycin is shown below (SEQ ID NOS:28-29).

| | |
|---|---|
| GCATGCGGCTGTACGAGGCGGCACGGCGCACCGGAAGTCCCGTGGTGGTG | 50 |
| M R L Y E A A R R T G S P V V V | |
| GCGGCCGCGCTCGACGACGCGCCGGACGTGCCGCTGCTGCGCGGGCTGCG | 100 |
| A A A L D D A P D V P L L R G L R | |
| GCGTACGACCGTCCGGCGTGCCGCCGTCCGGGAACGCTCTCTCGCCGACC | 150 |
| R T T V R R A A V R E R S L A D | |
| GCTCGCCGTGCTGCCCGACGACGAGCGCGCCGACGCCTCCCTCGCGTTCG | 200 |
| R S P C C P T T S A P T P P S R S | |
| TCCTGGAACAGCACCGCCACCGTGCTCGGCCACCTGGGCGCCGAAGACAT | 250 |
| S W N S T A T V L G H L G A E D I | |
| CCCGGCGACGACGACGTTCAAGGAACTCGGCATCGACTCGCTCACCGCGG | 300 |
| P A T T T F K E L G I D S L T A | |
| TCCAGCTGCGCAACGCGCTGACCACGGCGACCGGCGTACGCCTCAACGCC | 350 |
| V Q L R N A L T T A T G V R L N A | |
| ACAGCGGTCTTCGACTTTCCGACGCCGCGCGCGCTCGCCGCGAGACTCGG | 400 |
| T A V F D F P T P R A L A A R L G | |
| CGACGAGCTGGCCGGTACCCGCGCGCCCGTCGCGGCCCGGACCGCGGCCA | 450 |
| D E L A G T R A P V A A R T A A | |
| CCGCGGCCGCGCACGACGAACCGCTGGCGATCGTGGGCATGGCCTGCCGT | 500 |
| T A A A H D E P L A I V G M A C R | |
| CTGCCGGGCGGGGTCGCGTCGCCACAGGAGCTGTGGCGTCTCGTCGCGTC | 550 |
| L P G G V A S P O E L W R L V A S | |
| CGGCACCGACGCCATCACGGAGTTCCCCGCGGACCGCGGCTGGGACGTGG | 600 |
| G T D A I T E F P A D R G W D V | |
| ACGCGCTCTACGACCCGGACCCCGACGCGATCGGCAAGACCTTCGTCCGG | 650 |
| D A L Y D P D P D A I G K T F V R | |
| CACGGCGGCTTCCTCGACGGTGCGACCGGCTTCGACGCGGCGTTCTTCGG | 700 |
| H G G F L D G A T G F D A A F F G | |
| GATCAGCCCGCGCGAGGCCCTGGCCATGGACCCGCAGCAACGGGTGCTCC | 750 |
| I S P R E A L A M D P Q Q R V L | |
| TGGAGACGTCCTGGGAGGCGTTCGAAAGCGCGGGCATCACCCCGGACGCG | 800 |
| L E T S W E A F E S A G I T P D A | |
| GCGCGGGGCAGCGACACCGGCGTGTTCATCGGCGCGTTCTCCTACGGGTA | 850 |
| A R G S D T G V F I G A F S Y G Y | |
| CGGCACGGGTGCGGATACCAACGGCTTCGGCGCGACAGGGTCGCAGACCA | 900 |
| G T G A D T N G F G A T G S Q T | |
| GCGTGCTCTCCGGCCGCCTCTCGTACTTCTACGGTCTGGAGGGCCCTTCG | 950 |
| S V L S G R L S Y F Y G L E G P S | |
| GTCACGGTCGACACCGCCTGCTCGTCGTCACTGGTCGCCCTGCACCAGGC | 1000 |
| V T V D T A C S S S L V A L H Q A | |
| AGGGCAGTCCCTGCGCTCGGGCGAATGCTCGCTCGCCCTGGTCGGCGGTG | 1050 |
| G Q S L R S G E C S L A L V G G | |
| TCACGGTGATGGCGTCGCCCGGCGGATTCGTCGAGTTCTCCCGGCAGCGC | 1100 |
| V T V M A S P G G F V E F S R Q R | |
| GGGCTCGCGCCGGACGGGCGGGCGAAGGCGTTCGGCGCGGGCGCGGACGG | 1150 |
| G L A P D G R A K A F G A G A D G | |
| TACGAGCTTCGCCGAGGGCGCCGGTGCCCTGGTGGTCGAGCGGCTCTCCG | 1200 |
| T S F A E G A G A L V V E R L S | |
| ACGCGGAGCGCCACGGCCACACCGTCCTCGCCCTCGTACGCGGCTCCGCG | 1250 |
| D A E R H G H T V L A L V R G S A | |
| GCTAACTCCGACGGCGCGTCGAACGGTCTGTCGGCGCCGAACGGCCCCTC | 1300 |
| A N S D G A S N G L S A P N G P S | |
| CCAGGAACGCGTCATCCACCAGGCCCTCGCGAACGCGAAACTCACCCCCG | 1350 |
| Q E R V I H Q A L A N A K L T P | |
| CCGATGTCGACGCGGTCGAGGCGCACGGCACCGGCACCCGCCTCGGCGAC | 1400 |
| A D V D A V E A H G T G T R L G D | |
| CCCATCGAGGCGCAGGCGCTGCTCGCGACGTACGGACAGGACCGGGCGAC | 1450 |
| P I E A Q A L L A T Y G Q D R A T | |
| GCCCCTGCTGCTCGGCTCGCTGAAGTCGAACATCGGGCACGCCCAGGCCG | 1500 |
| P L L L G S L K S N I G H A Q A | |
| CGTCAGGGGTCGCCGGGATCATCAAGATGGTGCAGGCCATCCGGCACGGG | 1550 |
| A S G V A G I I K M V Q A I R H G | |
| GAACTGCCGCCGACACTGCACGCGGACGAGCCGTCGCCGCACGTCGACTG | 1600 |
| E L P P T L H A D E P S P H V D W | |
| GACGGCCGGTGCCGTCGAGCTCCTGACGTCGGCCCGGCCGTGGCCGGGGA | 1650 |
| T A G A V E L L T S A R P W P G | |
| CCGGTCGCCCTAGGCGGGCAGGCGTGTCGTCCTTCGGGATCAGTGGCACC | 1700 |
| T G R P R R A A V S S F G V S G T | |
| AACGCCCACGTCATCCTGGAGAGCGCACCCCCCGCTCAGCCCGCGGAGGA | 1750 |
| N A H V I L E S A P P A Q P A E E | |
| GGCGCAGCCTGTTGAGACGCCGGTGGTGGCCTCGGATGTGCTGCCGCTGG | 1800 |
| A Q P V E T P V V A S D V L P L | |
| TGATATCGGCCAAGACCCAGCCCGCCCTGACCGAACACGAAGACCGGCTG | 1850 |
| V I S A K T Q P A L T E H E D R L | |
| CGCGCCTACCTGGCGGCGTCGCCCGGGGCGGATATACGGGCTGTGGCATC | 1900 |
| R A Y L A A S P G A D I R A V A S | |
| GACGCTGGCGGTGACACGGTCGGTGTTCGAGCACCGCGCCGTACTCCTTG | 1950 |
| T L A V T R S V F E H R A V L L | |
| GAGATGACACCGTCACCGGCACCGCGGTGACCGACCCCAGGATCGTGTTT | 2000 |
| G D D T V T G T A V T D P R I V F | |
| GTCTTTCCCGGGCAGGGGTGGCAGTGGCTGGGGATGGGCAGTGCACTGCG | 2050 |
| V F P G Q G W Q W L G M G S A L R | |
| CGATTCGTCGGTGGTGTTCGCCGAGCGGATGGCCGAGTGTGCGGCGGCGT | 2100 |
| D S S V V F A E R M A E C A A A | |
| TGCGCGAGTTCGTGGACTGGGATCTGTTCACGGTTCTGGATGATCCGGCG | 2150 |
| L R E F V D W D L F T V L D D P A | |
| GTGGTGGACCGGGTTGATGTGGTCCAGCCCGCTTCCTGGGCGATGATGGT | 2200 |
| V V D R V D V V Q P A S W A M M V | |
| TTCCCTGGCCGCGGTGTGGCAGGCGGCCGGTGTGCGGCCGGATGCGGTGA | 2250 |
| S L A A V W Q A A G V R P D A V | |
| TCGGCCATTCGCAGGGTGAGATCGCCGCAGCTTGTGTGGCGGGTGCGGTG | 2300 |
| I G H S Q G E I A A A C V A G A V | |
| TCACTACGCGATGCCGCCCGGATCGTGACCTTGCGCAGCCAGGCGATCGC | 2350 |
| S L R D A A R I V T L R S Q A I A | |
| CCGGGGCCTGGCGGGCCGGGGCGCGATGGCATCCGTCGCCCTGCCCGCGC | 2400 |
| R G L A G R G A M A S V A L P A | |
| AGGATGTCGAGCTGGTCGACGGGGCCTGGATCGCCGCCCACAACGGGCCC | 2450 |
| Q D V E L V D G A W I A A H N G P | |
| GCCTCCACCGTGATCGCGGGCACCCCGGAAGCGGTCGACCATGTCCTCAC | 2500 |
| A S T V I A G T P E A V D H V L T | |
| CGCTCATGAGGCACAAGGGGTGCGGGTGCGGCGGATCACCGTCGACTATG | 2550 |
| A H E A Q G V R V R R I T V D Y | |
| CCTCGCACACCCCGCACGTCGAGCTGATCCGCGACGAACTACTCGACATC | 2600 |
| A S H T P H V E L I R D E L L D I | |
| ACTAGCGACAGCAGCTCGCAGACCCCGCTCGTGCCGTGGCTGTCGACCGT | 2650 |
| T S D S S S Q T P L V P W L S T V | |
| GGACGGCACCTGGGTCGACAGCCCGCTGGACGGGGAGTACTGGTACCGGA | 2700 |
| D G T W V D S P L D G E Y W Y R | |
| ACCTGCGTGAACCGGTCGGTTTCCACCCCGCCGTCAGCCAGTTGCAGGCC | 2750 |
| N L R E P V G F H P A V S Q L Q A | |
| CAGGGCGACACCGTGTTCGTCGAGGTCAGCGCCAGCCCGGTGTTGTTGCA | 2800 |
| Q G D T V F V E V S A S P V L L Q | |
| GGCGATGGACGACGATGTCGTCACGGTTGCCACGCTGCGTCGTGACGACG | 2850 |
| A M D D D V V T V A T L R R D D | |
| GCGACGCCACCCGGATGCTCACCGCCCTGGCACAGGCCTATGTCCACGGC | 2900 |
| G D A T R M L T A L A Q A Y V H G | |
| GTCACCGTCGACTGGCCCGCCATCCTCGGCACCACCACAACCCGGGTACT | 2950 |
| V T V D W P A I L G T T T T R V L | |
| GGACCTTCCGACCTACGCCTTCCAACACCAGCGGTACTGGCTCGAGTCGG | 3000 |
| D L P T Y A F Q H Q R Y W L E S | |
| CTCCCCCGGCCACGGCCGACTCGGGCCACCCCGTCCTCGGCACCGGAGTC | 3050 |
| A P P A T A D S G H P V L G T G V | |
| GCCGTCGCCGGGTCGCCGGGCCGGGTGTTCACGGGTCCCGTGCCCGCCGG | 3100 |
| A V A G S P G R V F T G P V P A G | |
| TGCGGACCGCGCGGTGTTCATCGCCGAACTGGCGCTCGCCGCCGCCGACG | 3150 |
| A D R A V F I A E L A L A A A D | |
| CCACCGACTGCGCCACGGTCGAACAGCTCGACGTCACCTCCGTGCCCGGC | 3200 |
| A T D C A T V E Q L D V T S V P G | |
| GGATCCGCCCGCGGCAGGGCCACCGCGCAGACCTGGGTCGATGAACCCGC | 3250 |
| G S A R G R A T A Q T W V D E P A | |
| CGCCGACGGGCGGCGCCGCTTCACCGTCCACACCCGCGTCGGCGACGCCC | 3300 |
| A D G R R R F T V H T R V G D A | |
| CGTGGACGCTGCACGCCGAGGGGGTTCTCCGCCCCGGCCGCGTGCCCCAG | 3350 |
| P W T L H A E G V L R P G R V P Q | |
| CCCGAAGCCGTCGACACCGCCTGGCCCCCGCCGGGCGCGGTGCCCGCGGA | 3400 |
| P E A V D T A W P P P G A V P A D | |
| CGGGCTGCCCGGGGCGTGGCGACGCGCGGACCAGGTCTTCGTCGAAGCCG | 3450 |
| G L P G A W R R A D Q V F V E A | |
| AAGTCGACAGCCCTGACGGCTTCGTGGCACACCCCGACCTGCTCGACGCG | 3500 |
| E V D S P D G F V A H P D L L D A | |
| GTCTTCTCCGCGGTCGGCGACGGGAGCCGCCAGCCGACCGGATGGCGCGA | 3550 |
| V F S A V G D G S R Q P T G W R D | |
| CCTCGCGGTGCACGCGTCGGACGCCACCGTGCTGCGCGCCTGCCTCACCC | 3600 |
| L A V H A S D A T V L R A C L T | |
| GCCGCGACAGTGGTGTCGTGGAGCTCGCCGCCTTCGACGGTGCCGGAATG | 3650 |
| R R D S G V V E L A A F D G A G M | |
| CCGGTGCTCACCGCGGAGTCGGTGACGCTGGGCGAGGTCGCGTCGGCAGG | 3700 |
| P V L T A E S V T L G E V A S A G | |
| CGGATCCGACGAGTCGGACGGTCTGCTTCGGCTTGAGTGGTTGCCGGTGG | 3750 |
| G S D E S D G L L R L E L P V | |
| CGGAGGCCCACTACGACGGTGCCGACGAGCTGCCCGAGGGCTACACCCTC | 3800 |
| A E A H Y D G A D E L P E G Y T L | |
| ATCACCGCCACACACCCCGACGACCCCGACGACCCCACCAACCCCCACAA | 3850 |
| I T A T H P D D P D D P T N P H N | |
| CACACCCACACGCACCCACACACAAACCACACGCGTCCTCACCGCCCTCC | 3900 |
| T P T R T H T Q T T R V L T A L | |
| AACACCACCTCATCACCACCAACCACACCCTCATCGTCCACACCACCACC | 3950 |
| Q H H L I T T N H T L I V H T T T | |
| GACCCCCCAGGCGCCGCCGTCACCGGCCTCACCCGCACCGCACAAAACGA | 4000 |
| D P P G A A V T G L T R T A Q N E | |
| ACACCCCGGCCGCATCCACCTCATCGAAACCCACCACCCCCACACCCCAC | 4050 |
| H P G R I H L I E T H H P H T P | |
| TCCCCCTCACCCAACTCACCACCCTCCACCAACCCCACCTACGCCTCACC | 4100 |
| L P L T Q L T T L H Q P H L R L T | |
| AACAACACCCTCCACACCCCCCACCTCACCCCCATCACCACCCACCACAA | 4150 |
| N N T L H T P H L T P I T T H H N | |
| CACCACCACAACCACCCCCAACACCCCACCCCTCAACCCCAACCACGCCA | 4200 |
| T T T T T P N T P P L N P N H A | |
| TCCTCATCACCGGCGGCTCCGGCACCCTCGCCGGCATCCTCGCCCGCCAC | 4250 |
| I L I T G G S G T L A G I L A R H | |
| CTCAACCACCCCCACACCTACCTCCTCTCCCGCACACCACCACCCCCCAC | 4300 |
| L N H P H T Y L L S R T P P P P T | |
| CACACCCGGCACCCACATCCCCTGCGACCTCACCGACCCCACCCAAATCA | 4350 |
| T P G T H I P C D L T D P T Q I | |
| CCCAAGCCCTCACCCACATACCACAACCCCTCACCGGCATCTTCCACACC | 4400 |
| T Q A L T H I P Q P L T G I F H T | |
| GCCGCCACCCTCGACGACGCCACCCTCACCAACCTCACCCCGCAACACCT | 4450 |
| A A T L D D A T L T N L T P Q H L | |
| CACCACCACCCTCCAACCCAAAGCCGACGCCGCCTGGCACCTCCACCACC | 4500 |
| T T T L Q P K A D A A W H L H H | |
| ACACCCAAAACCAACCCCTCACCCACTTCGTCCTCTACTCCAGCGCCGCC | 4550 |
| H T Q N Q P L T H F V L Y S S A A | |
| GCCACCCTCGGCAGCCCCGGCCAAGCCAACTACGCCGCCGCCAACGCCTT | 4600 |
| A T L G S P G Q A N Y A A A N A F | |
| CCTCGACGCCCTCGCCACCCACCGCCACACCCAAGGACAACCCGCCACCA | 4600 |
| L D A L A T H R H T Q G G P A T | |
| CCATCGCCTGGGGCATGTGGCACACCACCACCACACTCACCAGCCAACTC | 4700 |
| T I A W G M W H T T T T L T S Q L | |
| ACCGACAGCGACCGCGACCGCATCCGCCGCGGCGGCTTCCTGCCGATCTC | 4750 |
| T D S D R D R I R R G G F L P I S | |
| GGACGACGAGGGCATGC | |
| D D E G M | |

[0220] The NheI-XhoI hybrid FK-506 PKS module 8 containing the AT domain of module 12 of rapamycin is shown below (SEQ ID NOS:30-31).

| | |
|---|---|
| GCATGCGGCTGTACGAGGCGGCACGGCGCACCGGAAGTCCCGTGGTGGTG | 50 |
| M R L Y E A A R R T G S P V V V | |
| GCGGCCGCGCTCGACGACGCGCCGGACGTGCCGCTGCTGCGCGGGCTGCG | 100 |
| A A A L D D A P D V P L L R G L R | |
| GCGTACGACCGTCCGGCGTGCCGCCGTCCGGGAACGCTCTCTCGCCGACC | 150 |
| R T T V R R A A V R E R S L A D | |
| GCTCGCCGTGCTGCCCGACGACGAGCGCGCCGACGCCTCCCTCGCGTTCG | 200 |
| R S P C C P T T S A P T P P S R S | |
| TCCTGGAACAGCACCGCCACCGTGCTCGGCCACCTGGGCGCCGAAGACAT | 250 |
| S W N S T A T V L G H L G A E D I | |
| CCCGGCGACGACGACGTTCAAGGAACTCGGCATCGACTCGCTCACCGCGG | 300 |
| P A T T T F K E L G I D S L T A | |
| TCCAGCTGCGCAACGCGCTGACCACGGCGACCGGCGTACGCCTCAACGCC | 350 |
| V Q L R N A L T T A T G V R L N A | |
| ACAGCGGTCTTCGACTTTCCGACGCCGCGCGCGCTCGCCGCGAGACTCGG | 400 |
| T A V F D F P T P R A L A A R L G | |
| CGACGAGCTGGCCGGTACCCGCGCGCCCGTCGCGGCCCGGACCGCGGCCA | 450 |
| D E L A G T R A P V A A R T A A | |
| CCGCGGCCGCGCACGACGAACCGCTGGCGATCGTGGGCATGGCCTGCCGT | 500 |
| T A A A H D E P L A I V G M A C R | |
| CTGCCGGGCGGGGTCGCGTCGCCACAGGAGCTGTGGCGTCTCGTCGCGTC | 550 |
| L P G G V A S P O E L W R L V A S | |
| CGGCACCGACGCCATCACGGAGTTCCCCGCGGACCGCGGCTGGGACGTGG | 600 |
| G T D A I T E F P A D R G W D V | |
| ACGCGCTCTACGACCCGGACCCCGACGCGATCGGCAAGACCTTCGTCCGG | 650 |
| D A L Y D P D P D A I G K T F V R | |
| CACGGCGGCTTCCTCGACGGTGCGACCGGCTTCGACGCGGCGTTCTTCGG | 700 |
| H G G F L D G A T G F D A A F F G | |
| GATCAGCCCGCGCGAGGCCCTGGCCATGGACCCGCAGCAACGGGTGCTCC | 750 |
| I S P R E A L A M D P Q Q R V L | |
| TGGAGACGTCCTGGGAGGCGTTCGAAAGCGCGGGCATCACCCCGGACGCG | 800 |
| L E T S W E A F E S A G I T P D A | |
| GCGCGGGGCAGCGACACCGGCGTGTTCATCGGCGCGTTCTCCTACGGGTA | 850 |
| A R G S D T G V F I G A F S Y G Y | |
| CGGCACGGGTGCGGATACCAACGGCTTCGGCGCGACAGGGTCGCAGACCA | 900 |
| G T G A D T N G F G A T G S Q T | |
| GCGTGCTCTCCGGCCGCCTCTCGTACTTCTACGGTCTGGAGGGCCCTTCG | 950 |
| S V L S G R L S Y F Y G L E G P S | |
| GTCACGGTCGACACCGCCTGCTCGTCGTCACTGGTCGCCCTGCACCAGGC | 1000 |
| V T V D T A C S S S L V A L H Q A | |
| AGGGCAGTCCCTGCGCTCGGGCGAATGCTCGCTCGCCCTGGTCGGCGGTG | 1050 |
| G Q S L R S G E C S L A L V G G | |
| TCACGGTGATGGCGTCGCCCGGCGGATTCGTCGAGTTCTCCCGGCAGCGC | 1100 |
| V T V M A S P G G F V E F S R Q R | |
| GGGCTCGCGCCGGACGGGCGGGCGAAGGCGTTCGGCGCGGGCGCGGACGG | 1150 |
| G L A P D G R A K A F G A G A D G | |
| TACGAGCTTCGCCGAGGGCGCCGGTGCCCTGGTGGTCGAGCGGCTCTCCG | 1200 |
| T S F A E G A G A L V V E R L S | |
| ACGCGGAGCGCCACGGCCACACCGTCCTCGCCCTCGTACGCGGCTCCGCG | 1250 |
| D A E R H G H T V L A L V R G S A | |
| GCTAACTCCGACGGCGCGTCGAACGGTCTGTCGGCGCCGAACGGCCCCTC | 1300 |
| A N S D G A S N G L S A P N G P S | |
| CCAGGAACGCGTCATCCACCAGGCCCTCGCGAACGCGAAACTCACCCCCG | 1350 |
| Q E R V I H Q A L A N A K L T P | |
| CCGATGTCGACGCGGTCGAGGCGCACGGCACCGGCACCCGCCTCGGCGAC | 1400 |
| A D V D A V E A H G T G T R L G D | |
| CCCATCGAGGCGCAGGCGCTGCTCGCGACGTACGGACAGGACCGGGCGAC | 1450 |
| P I E A Q A L L A T Y G Q D R A T | |
| GCCCCTGCTGCTCGGCTCGCTGAAGTCGAACATCGGGCACGCCCAGGCCG | 1500 |
| P L L L G S L K S N I G H A Q A | |
| CGTCAGGGGTCGCCGGGATCATCAAGATGGTGCAGGCCATCCGGCACGGG | 1550 |
| A S G V A G I I K M V Q A I R H G | |
| GAACTGCCGCCGACACTGCACGCGGACGAGCCGTCGCCGCACGTCGACTG | 1600 |
| E L P P T L H A D E P S P H V D W | |
| GACGGCCGGTGCCGTCGAGCTCCTGACGTCGGCCCGGCCGTGGCCGGGGA | 1650 |
| T A G A V E L L T S A R P W P G | |
| CCGGTCGCCCGCGCCGCGCTGCCGTCTCGTCGTTCGGCGTGAGCGGCACG | 1700 |
| T G R P R R A A V S S F G V S G T | |
| AACGCCCACATCATCCTTGAGGCAGGACCGGTCAAAACGGGACCGGTCGA | 1750 |
| N A H I I L E A G P V K T G P V E | |
| GGCAGGAGCGATCGAGGCAGGACCGGTCGAAGTAGGACCGGTCGAGGCTG | 1800 |
| A G A I E A G P V E V G P V E A | |
| GACCGCTCCCCGCGGCGCCGCCGTCAGCACCGGGCGAAGACCTTCCGCTG | 1850 |
| G P L P A A P P S A P G E D L P L | |
| CTCGTGTCGGCGCGTTCCCCGGAGGCACTCGACGAGCAGATCGGGCGCCT | 1900 |
| L V S A R S P E A L D E Q I G R L | |
| GCGCGCCTATCTCGACACCGGCCCGGGCGTCGACCGGGCGGCCGTGGCGC | 1950 |
| R A Y L D T G P G V D R A A V A | |
| AGACACTGGCCCGGCGTACGCACTTCACCCACCGGGCCGTACTGCTCGGG | 2000 |
| Q T L A R R T H F T H R A V L L G | |
| GACACCGTCATCGGCGCTCCCCCCGCGGACCAGGCCGACGAACTCGTCTT | 2050 |
| D T V I G A P P A D Q A D E L V F | |
| CGTCTACTCCGGTCAGGGCACCCAGCATCCCGCGATGGGCGAGCAGCTAG | 2100 |
| V Y S G Q G T Q H P A M G E Q L | |
| CCGCCGCGTTCCCCGTCTTCGCGCGGATCCATCAGCAGGTGTGGGACCTG | 2150 |
| A A A F P V F A R I H Q Q V W D L | |
| CTCGATGTGCCCGATCTGGAGGTGAACGAGACCGGTTACGCCCAGCCGGC | 2200 |
| L D V P D L E V N E T G Y A Q P A | |
| CCTGTTCGCAATGCAGGTGGCTCTGTTCGGGCTGCTGGAATCGTGGGGTG | 2250 |
| L F A M Q V A L F G L L E S W G | |
| TACGACCGGACGCGGTGATCGGCCATTCGGTGGGTGAGCTTGCGGCTGCG | 2300 |
| V R P D A V I G H S V G E L A A A | |
| TATGTGTCCGGGGTGTGGTCGTTGGAGGATGCCTGCACTTTGGTGTCGGC | 2350 |
| Y V S G V W S L E D A C T L V S A | |
| GCGGGCTCGTCTGATGCAGGCTCTGCCCGCGGGTGGGGTGATGGTCGCTG | 2400 |
| R A R L M Q A L P A G G V M V A | |
| TCCCGGTCTCGGAGGATGAGGCCCGGGCCGTGCTGGGTGAGGGTGTGGAG | 2450 |
| V P V S E D E A R A V L G E G V E | |
| ATCGCCGCGGTCAACGGCCCGTCGTCGGTGGTTCTCTCCGGTGATGAGGC | 2500 |
| I A A V N G P S S V V L S G D E A | |
| CGCCGTGCTGCAGGCCGCGGAGGGGCTGGGGAAGTGGACGCGGCTGGCGA | 2550 |
| A V L Q A A E G L G K W T R L A | |
| CCAGCCACGCGTTCCATTCCGCCCGTATGGAACCCATGCTGGAGGAGTTC | 2600 |
| T S H A F H S A R M E P M L E E F | |
| CGGGCGGTCGCCGAAGGCCTGACCTACCGGACGCCGCAGGTCTCCATGGC | 2650 |
| R A V A E G L T Y R T P Q V S M A | |
| CGTTGGTGATCAGGTGACCACCGCTGAGTACTGGGTGCGGCAGGTCCGGG | 2700 |
| V G D Q V T T A E Y W V R Q V R | |
| ACACGGTCCGGTTCGGCGAGCAGGTGGCCTCGTACGAGGACGCCGTGTTC | 2750 |
| D T V R F G E Q V A S Y E D A V F | |
| GTCGAGCTGGGTGCCGACCGGTCACTGGCCCGCCTGGTCGACGGTGTCGC | 2800 |
| V E L G A D R S L A R L V D G V A | |
| GATGCTGCACGGCGACCACGAAATCCAGGCCGCGATCGGCGCCCTGGCCC | 2850 |
| M L H G D H E I Q A A I G A L A | |
| ACCTGTATGTCAACGGCGTCACGGTCGACTGGCCCGCGCTCCTGGGCGAT | 2900 |
| H L Y V N G V T V D W P A L L G D | |
| GCTCCGGCAACACGGGTGCTGGACCTTCCGACATACGCCTTCCAGCACCA | 2950 |
| A P A T R V L D L P T Y A F Q H Q | |
| GCGCTACTGGCTCGAGTCGGCTCCCCCGGCCACGGCCGACTCGGGCCACC | 3000 |
| R Y W L E S A P P A T A D S G H | |
| CCGTCCTCGGCACCGGAGTCGCCGTCGCCGGGTCGCCGGGCCGGGTGTTC | 3050 |
| P V L G T G V A V A G S P G R V F | |
| ACGGGTCCCGTGCCCGCCGGTGCGGACCGCGCGGTGTTCATCGCCGAACT | 3100 |
| T G P V P A G A D R A V F I A E L | |
| GGCGCTCGCCGCCGCCGACGCCACCGACTGCGCCACGGTCGAACAGCTCG | 3150 |
| A L A A A D A T D C A T V E Q L | |
| ACGTCACCTCCGTGCCCGGCGGATCCGCCCGCGGCAGGGCCACCGCGCAG | 3200 |
| D V T S V P G G S A R G R A T A Q | |
| ACCTGGGTCGATGAACCCGCCGCCGACGGGCGGCGCCGCTTCACCGTCCA | 3250 |
| T W V D E P A A D G R R R F T V H | |
| CACCCGCGTCGGCGACGCCCCGTGGACGCTGCACGCCGAGGGGGTTCTCC | 3300 |
| T R V G D A P W T L H A E G V L | |
| GCCCCGGCCGCGTGCCCCAGCCCGAAGCCGTCGACACCGCCTGGCCCCCG | 3350 |
| R P G R V P Q P E A V D T A W P P | |
| CCGGGCGCGGTGCCCGCGGACGGGCTGCCCGGGGCGTGGCGACGCGCGGA | 3400 |
| P G A V P A D G L P G A W R R A D | |
| CCAGGTCTTCGTCGAAGCCGAAGTCGACAGCCCTGACGGCTTCGTGGCAC | 3450 |
| Q V F V E A E V D S P D G F V A | |
| ACCCCGACCTGCTCGACGCGGTCTTCTCCGCGGTCGGCGACGGGAGCCGC | 3500 |
| H P D L L D A V F S A V G D G S R | |
| CAGCCGACCGGATGGCGCGACCTCGCGGTGCACGCGTCGGACGCCACCGT | 3550 |
| Q P T G W R D L A V H A S D A T V | |
| GCTGCGCGCCTGCCTCACCCGCCGCGACAGTGGTGTCGTGGAGCTCGCCG | 3600 |
| L R A C L T R R D S G V V E L A | |
| CCTTCGACGGTGCCGGAATGCCGGTGCTCACCGCGGAGTCGGTGACGCTG | 3650 |
| A F D G A G M P V L T A E S V T L | |
| GGCGAGGTCGCGTCGGCAGGCGGATCCGACGAGTCGGACGGTCTGCTTCG | 3700 |
| G E V A S A G G S D E S D G L L R | |
| GCTTGAGTGGTTGCCGGTGGCGGAGGCCCACTACGACGGTGCCGACGAGC | 3750 |
| L E W L P V A E A H Y D G A D E | |
| TGCCCGAGGGCTACACCCTCATCACCGCCACACACCCCGACGACCCCGAC | 3800 |
| L P E G Y T L I T A T H P D D P D | |
| GACCCCACCAACCCCCACAACACACCCACACGCACCCACACACAAACCAC | 3850 |
| D P T N P H N T P T R T H T Q T T | |
| ACGCGTCCTCACCGCCCTCCAACACCACCTCATCACCACCAACCACACCC | 3900 |
| R V L T A L P H H L I T T N H T | |
| TCATCGTCCACACCACCACCGACCCCCCAGGCGCCGCCGTCACCGGCCTC | 3950 |
| L I V H T T T D P P G A A V T G L | |
| ACCCGCACCGCACAAAACGAACACCCCGGCCGCATCCACCTCATCGAAAC | 4000 |
| T R T A Q N E H P G R I H L I E T | |
| CCACCACCCCCACACCCCACTCCCCCTCACCCAACTCACCACCCTCCACC | 4050 |
| H H P H T P L P L T Q L T T L H | |
| AACCCCACCTACGCCTCACCAACAACACCCTCCACACCCCCCACCTCACC | 4100 |
| Q P H L R L T N N T L H T P H L T | |
| CCCATCACCACCCACCACAACACCACCACAACCACCCCCAACACCCCACC | 4150 |
| P I T T H H N T T T T T P N T P P | |
| CCTCAACCCCAACCACGCCATCCTCATCACCGGCGGCTCCGGCACCCTCG | 4200 |
| L N P N H A I L I T G G S G T L | |
| CCGGCATCCTCGCCCGCCACCTCAACCACCCCCACACCTACCTCCTCTCC | 4250 |
| A G I L A R H L N H P H T Y L L S | |
| CGCACACCACCACCCCCCACCACACCCGGCACCCACATCCCCTGCGACCT | 4300 |
| R T P P P P T T P G T H I P C D L | |
| CACCGACCCCACCCAAATCACCCAAGCCCTCACCCACATACCACAACCCC | 4350 |
| T D P T Q I T Q A L T H I P Q P | |
| TCACCGGCATCTTCCACACCGCCGCCACCCTCGACGACGCCACCCTCACC | 4400 |
| L T G I F H T A A T L D D A T L T | |
| AACCTCACCCCCCAACACCTCACCACCACCCTCCAACCCAAAGCCGACGC | 4450 |
| N L T P Q H L T T T L Q P K A D A | |
| CGCCTGGCACCTCCACCACCACACCCAAAACCAACCCCTCACCCACTTCG | 4500 |
| A W H L H H H T Q N Q P L T H F | |
| TCCTCTACTCCAGCGCCGCCGCCACCCTCGGCAGCCCCGGCCAAGCCAAC | 4550 |
| V L Y S S A A A T L G S P G Q A N | |
| TACGCCGCCGCCAACGCCTTCCTCGACGCCCTCGCCACCGACCGCCACAC | 4600 |
| Y A A A N A F L D A L A T H R H T | |
| CCAAGGACAACCCGCCACCACCATCGCCTGGGGCATGTGGCACACCACCA | 4650 |
| Q G Q P A T T I A W G M W H T T | |
| CCACACTCACCAGCCAACTCACCGACAGCGACCGCGACCGCATCCGCCGC | 4700 |
| T T L T S Q L T D S D R D R I R R | |
| GGCGGCTTCCTGCCGATCTCGGACGACGAGGGCATGC | |
| G G F L P I S D D E G M | |

[0221] The NheI-XhoI hybrid FK-506 PKS module 8 containing the AT domain of module 13 of rapamycin is shown below (SEQ ID NOS:32-33).

| | |
|---|---|
| GCATGCGGCTGTACGAGGCGGCACGGCGCACCGGAAGTCCCGTGGTGGTG | 50 |
| M R L Y E A A R R T G S P V V V | |
| GCGGCCGCGCTCGACGACGCGCCGGACGTGCCGCTGCTGCGCGGGCTGCG | 100 |
| A A A L D D A P D V P L L R G L R | |
| GCGTACGACCGTCCGGCGTGCCGCCGTCCGGGAACGCTCTCTCGCCGACC | 150 |
| R T T V R R A A V R E R S L A D | |
| GCTCGCCGTGCTGCCCGACGACGAGCGCGCCGACGCCTCCCTCGCGTTCG | 200 |
| R S P C C P T T S A P T P P S R S | |
| TCCTGGAACAGCACCGCCACCGTGCTCGGCCACCTGGGCGCCGAAGACAT | 250 |
| S W N S T A T V L G H L G A E D I | |
| CCCGGCGACGACGACGTTCAAGGAACTCGGCATCGACTCGCTCACCGCGG | 300 |
| P A T T T F K E L G I D S L T A | |
| TCCAGCTGCGCAACGCGCTGACCACGGCGACCGGCGTACGCCTCAACGCC | 350 |
| V Q L R N A L T T A T G V R L N A | |
| ACAGCGGTCTTCGACTTTCCGACGCCGCGCGCGCTCGCCGCGAGACTCGG | 400 |
| T A V F D F P T P R A L A A R L G | |
| CGACGAGCTGGCCGGTACCCGCGCGCCCGTCGCGGCCCGGACCGCGGCCA | 450 |
| D E L A G T R A P V A A R T A A | |
| CCGCGGCCGCGCACGACGAACCGCTGGCGATCGTGGGCATGGCCTGCCGT | 500 |
| T A A A H D E P L A I V G M A C R | |
| CTGCCGGGCGGGGTCGCGTCGCCACAGGAGCTGTGGCGTCTCGTCGCGTC | 550 |
| L P G G V A S P O E L W R L V A S | |
| CGGCACCGACGCCATCACGGAGTTCCCCGCGGACCGCGGCTGGGACGTGG | 600 |
| G T D A I T E F P A D R G W D V | |
| ACGCGCTCTACGACCCGGACCCCGACGCGATCGGCAAGACCTTCGTCCGG | 650 |
| D A L Y D P D P D A I G K T F V R | |
| CACGGCGGCTTCCTCGACGGTGCGACCGGCTTCGACGCGGCGTTCTTCGG | 700 |
| H G G F L D G A T G F D A A F F G | |
| GATCAGCCCGCGCGAGGCCCTGGCCATGGACCCGCAGCAACGGGTGCTCC | 750 |
| I S P R E A L A M D P Q Q R V L | |
| TGGAGACGTCCTGGGAGGCGTTCGAAAGCGCGGGCATCACCCCGGACGCG | 800 |
| L E T S W E A F E S A G I T P D A | |
| GCGCGGGGCAGCGACACCGGCGTGTTCATCGGCGCGTTCTCCTACGGGTA | 850 |
| A R G S D T G V F I G A F S Y G Y | |
| CGGCACGGGTGCGGATACCAACGGCTTCGGCGCGACAGGGTCGCAGACCA | 900 |
| G T G A D T N G F G A T G S Q T | |
| GCGTGCTCTCCGGCCGCCTCTCGTACTTCTACGGTCTGGAGGGCCCTTCG | 950 |
| S V L S G R L S Y F Y G L E G P S | |
| GTCACGGTCGACACCGCCTGCTCGTCGTCACTGGTCGCCCTGCACCAGGC | 1000 |
| V T V D T A C S S S L V A L H Q A | |
| AGGGCAGTCCCTGCGCTCGGGCGAATGCTCGCTCGCCCTGGTCGGCGGTG | 1050 |
| G Q S L R S G E C S L A L V G G | |
| TCACGGTGATGGCGTCGCCCGGCGGATTCGTCGAGTTCTCCCGGCAGCGC | 1100 |
| V T V M A S P G G F V E F S R Q R | |
| GGGCTCGCGCCGGACGGGCGGGCGAAGGCGTTCGGCGCGGGCGCGGACGG | 1150 |
| G L A P D G R A K A F G A G A D G | |
| TACGAGCTTCGCCGAGGGCGCCGGTGCCCTGGTGGTCGAGCGGCTCTCCG | 1200 |
| T S F A E G A G A L V V E R L S | |
| ACGCGGAGCGCCACGGCCACACCGTCCTCGCCCTCGTACGCGGCTCCGCG | 1250 |
| D A E R H G H T V L A L V R G S A | |
| GCTAACTCCGACGGCGCGTCGAACGGTCTGTCGGCGCCGAACGGCCCCTC | 1300 |
| A N S D G A S N G L S A P N G P S | |
| CCAGGAACGCGTCATCCACCAGGCCCTCGCGAACGCGAAACTCACCCCCG | 1350 |
| Q E R V I H Q A L A N A K L T P | |
| CCGATGTCGACGCGGTCGAGGCGCACGGCACCGGCACCCGCCTCGGCGAC | 1400 |
| A D V D A V E A H G T G T R L G D | |
| CCCATCGAGGCGCAGGCGCTGCTCGCGACGTACGGACAGGACCGGGCGAC | 1450 |
| P I E A Q A L L A T Y G Q D R A T | |
| GCCCCTGCTGCTCGGCTCGCTGAAGTCGAACATCGGGCACGCCCAGGCCG | 1500 |
| P L L L G S L K S N I G H A Q A | |
| CGTCAGGGGTCGCCGGGATCATCAAGATGGTGCAGGCCATCCGGCACGGG | 1550 |
| A S G V A G I I K M V Q A I R H G | |
| GAACTGCCGCCGACACTGCACGCGGACGAGCCGTCGCCGCACGTCGACTG | 1600 |
| E L P P T L H A D E P S P H V D W | |
| GACGGCCGGTGCCGTCGAGCTCCTGACGTCGGCCCGGCCGTGGCCGGGGA | 1650 |
| T A G A V E L L T S A R P W P G | |
| CCGGTCGCCCGCGCCGCGCTGCCGTCTCGTCGTTCGGCGTGAGCGGCACG | 1700 |
| T G R P R R A A V S S F G V S G T | |
| AACGCCCACATCATCCTTGAGGCAGGACCGGTCAAAACGGGACCGGTCGA | 1750 |
| N A H I I L E A G P V K T G P V E | |
| GGCAGGAGCGATCGAGGCAGGACCGGTCGAAGTAGGACCGGTCGAGGCTG | 1800 |
| A G A I E A G P V E V G P V E A | |
| GACCGCTCCCCGCGGCGCCGCCGTCAGCACCGGGCGAAGACCTTCCGCTG | 1850 |
| G P L P A A P P S A P G E D L P L | |
| CTCGTGTCGGCGCGTTCCCCGGAGGCACTCGACGAGCAGATCGGGCGCCT | 1900 |
| L V S A R S P E A L D E Q I G R L | |
| GCGCGCCTATCTCGACACCGGCCCGGGCGTCGACCGGGCGGCCGTGGCGC | 1950 |
| R A Y L D T G P G V D R A A V A | |
| AGACACTGGCCCGGCGTACGCACTTCACCCACCGGGCCGTACTGCTCGGG | 2000 |
| Q T L A R R T H F T H R A V L L G | |
| GACACCGTCATCGGCGCTCCCCCCGCGGACCAGGCCGACGAACTCGTCTT | 2050 |
| D T V I G A P P A D Q A D E L V F | |
| CGTCTACTCCGGTCAGGGCACCCAGCATCCCGCGATGGGCGAGCAGCTAG | 2100 |
| V Y S G Q G T Q H P A M G E Q L | |
| CCGATTCGTCGGTGGTGTTCGCCGAGCGGATGGCCGAGTGTGCGGCGGCG | 2150 |
| A D S S V V F A E R M A E C A A A | |
| TTGCGCGAGTTCGTGGACTGGGATCTGTTCACGGTTCTGGATGATCCGGC | 2200 |
| L R E F V D W D L F T V L D D P A | |
| GGTGGTGGACCGGGTTGATGTGGTCCAGCCCGCTTCCTGGGCGATGATGG | 2250 |
| V V D R V D V V Q P A S W A M M | |
| TTTCCCTGGCCGCGGTGTGGCAGGCGGCCGGTGTGCGGCCGGATGCGGTG | 2300 |
| V S L A A V W Q A A G V R P D A V | |
| ATCGGCCATTCGCAGGGTGAGATCGCCGCAGCTTGTGTGGCGGGTGCGGT | 2350 |
| I G H S Q G E I A A A C V A G A V | |
| GTCACTACGCGATGCCGCCCGGATCGTGACCTTGCGCAGCCAGGCGATCG | 2400 |
| S L R D A A R I V T L R S Q A I | |
| CCCGGGGCCTGGCGGGCCGGGGCGCGATGGCATCCGTCGCCCTGCCCGCG | 2450 |
| A R G L A G R G A M A S V A L P A | |
| CAGGATGTCGAGCTGGTCGACGGGGCCTGGATCGCCGCCCACAACGGGCC | 2500 |
| Q D V E L V D G A W I A A H N G P | |
| CGCCTCCACCGTGATCGCGGGCACCCCGGAAGCGGTCGACCATGTCCTCA | 2550 |
| A S T V I A G T P E A V D H V L | |
| CCGCTCATGAGGCACAAGGGGTGCGGGTGCGGCGGATCACCGTCGACTAT | 2600 |
| T A H E A Q G V R V R R I T V D Y | |
| GCCTCGCACACCCCGCACGTCGAGCTGATCCGCGACGAACTACTCGACAT | 2650 |
| A S H T P H V E L I R D E L L D I | |
| CACTAGCGACAGCAGCTCGCAGACCCCGCTCGTGCCGTGGCTGTCGACCG | 2700 |
| T S D S S S Q T P L V P W L S T | |
| TGGACGGCACCTGGGTCGACAGCCCGCTGGACGGGGAGTACTGGTACCGG | 2750 |
| V D G T W V D S P L D G E Y W Y R | |
| AACCTGCGTGAACCGGTCGGTTTCCACCCCGCCGTCAGCCAGTTGCAGGC | 2800 |
| N L R E P V G F H P A V S Q L Q A | |
| CCAGGGCGACACCGTGTTCGTCGAGGTCAGCGCCAGCCCGGTGTTGTTGC | 2850 |
| Q G D T V F V E V S A S P V L L | |
| AGGCGATGGACGACGATGTCGTCACGGTTGCCACGCTGCGTCGTGACGAC | 2900 |
| Q A M D D D V V T V A T L R R D D | |
| GGCGACGCCACCCGGATGCTCACCGCCCTGGCACAGGCCTATGTCCACGG | 2950 |
| G D A T R M L T A L A Q A Y V H G | |
| CGTCACCGTCGACTGGCCCGCCATCCTCGGCACCACCACAACCCGGGTAC | 3000 |
| V T V D W P A I L G T T T T R V | |
| TGGACCTTCCGACCTACGCCTTCCAACACCAGCGGTACTGGCTCGAGTCG | 3050 |
| L D L P T Y A F Q H Q R Y W L E S | |
| GCTCCCCCGGCCACGGCCGACTCGGGCCACCCCGTCCTCGGCACCGGAGT | 3100 |
| A P P A T A D S G H P V L G T G V | |
| CGCCGTCGCCGGGTCGCCGGGCCGGGTGTTCACGGGTCCCGTGCCCGCCG | 3150 |
| A V A G S P G R V F T G P V P A | |
| GTGCGGACCGCGCGGTGTTCATCGCCGAACTGGCGCTCGCCGCCGCCGAC | 3200 |
| G A D R A V F I A E L A L A A A D | |
| GCCACCGACTGCGCCACGGTCGAACAGCTCGACGTCACCTCCGTGCCCGG | 3250 |
| A T D C A T V E Q L D V T S V P G | |
| CGGATCCGCCCGCGGCAGGGCCACCGCGCAGACCTGGGTCGATGAACCCG | 3300 |
| G S A R G R A T A Q T W V D E P | |
| CCGCCGACGGGCGGCGCCGCTTCACCGTCCACACCCGCGTCGGCGACGCC | 3350 |
| A A D G R R R F T V H T R V G D A | |
| CCGTGGACGCTGCACGCCGAGGGGGTTCTCCGCCCCGGCCGCGTGCCCCA | 3400 |
| P W T L H A E G V L R P G R V P Q | |
| GCCCGAAGCCGTCGACACCGCCTGGCCCCCGCCGGGCGCGGTGCCCGCGG | 3450 |
| P E A V D T A W P P P G A V P A | |
| ACGGGCTGCCCGGGGCGTGGCGACGCGCGGACCAGGTCTTCGTCGAAGCC | 3500 |
| D G L P G A W R R A D Q V F V E A | |
| GAAGTCGACAGCCCTGACGGCTTCGTGGCACACCCCGACCTGCTCGACGC | 3550 |
| E V D S P D G F V A H P D L L D A | |
| GGTCTTCTCCGCGGTCGGCGACGGGAGCCGCCAGCCGACCGGATGGCGCG | 3600 |
| V F S A V G D G S R Q P T G W R | |
| ACCTCGCGGTGCACGCGTCGGACGCCACCGTGCTGCGCGCCTGCCTCACC | 3650 |
| D L A V H A S D A T V L R A C L T | |
| CGCCGCGACAGTGGTGTCGTGGAGCTCGCCGCCTTCGACGGTGCCGGAAT | 3700 |
| R R D S G V V E L A A F D G A G M | |
| GCCGGTGCTCACCGCGGAGTCGGTGACGCTGGGCGAGGTCGCGTCGGCAG | 3750 |
| P V L T A E S V T L G E V A S A | |
| GCGGATCCGACGAGTCGGACGGTCTGCTTCGGCTTGAGTGGTTGCCGGTG | 3800 |
| G G S D E S D G L L R L E W L P V | |
| GCGGAGGCCCACTACGACGGTGCCGACGAGCTGCCCGAGGGCTACACCCT | 3850 |
| A E A H Y D G A D E L P E G Y T L | |
| CATCACCGCCACACACCCCGACGACCCCGACGACCCCACCAACCCCCACA | 3900 |
| I T A T H P D D P D D P T N P H | |
| ACACACCCACACGCACCCACACACAAACCACACGCGTCCTCACCGCCCTC | 3950 |
| N T P T R T H T Q T T R V L T A L | |
| CAACACCACCTCATCACCACCAACCACACCCTCATCGTCCACACCACCAC | 4000 |
| Q H H L I T T N H T L I V H T T T | |
| CGACCCCCCAGGCGCCGCCGTCACCGGCCTCACCCGCACCGCACAAAACG | 4050 |
| D P P G A A V T G L T R T A Q N | |
| AACACCCCGGCCGCATCCACCTCATCGAAACCCACCACCCCCACACCCCA | 4100 |
| E H P G R I H L I E T H H P H T P | |
| CTCCCCCTCACCCAACTCACCACCCTCCACCAACCCCACCTACGCCTCAC | 4150 |
| L P L T Q L T T L H Q P H L R L T | |
| CAACAACACCCTCCACACCCCCCACCTCACCCCCATCACCACCCACCACA | 4200 |
| N N T L H T P H L T P I T T H H | |
| ACACCACCACAACCACCCCCAACACCCCACCCCTCAACCCCAACCACGCC | 4250 |
| N T T T T T P N T P P L N P N H A | |
| ATCCTCATCACCGGCGGCTCCGGCACCCTCGCCGGCATCCTCGCCCGCCA | 4300 |
| I L I T G G S G T L A G I L A R H | |
| CCTCAACCACCCCCACACCTACCTCCTCTCCCGCACACCACCACCCCCCA | 4350 |
| L N H P H T Y L L S R T P P P P | |
| CCACACCCGGCACCCACATCCCCTGCGACCTCACCGACCCCACCCAAATC | 4400 |
| T T P G T H I P C D L T D P T Q I | |
| ACCCAAGCCCTCACCCACATACCACAACCCCTCACCGGCATCTTCCACAC | 4450 |
| T Q A L T H I P Q P L T G I F H T | |
| CGCCGCCACCCTCGACGACGCCACCCTCACCAACCTCACCCCCCAACACC | 4500 |
| A A T L D D A T L T N L T P Q H | |
| TCACCACCACCCTCCAACCCAAAGCCGACGCCGCCTGGCACCTCcACCAC | 4550 |
| L T T T L Q P K A D A A W H L H H | |
| CACACCCAAAACCAACCCCTCACCCACTTCGTCCTCTACTCCAGCGCCGC | 4600 |
| H T Q N Q P L T H F V L Y S S A A | |
| CGCCACCCTCGGCAGCCCCGGCCAAGCCAACTACGCCGCCGCCAACGCCT | 4650 |
| A T L G S P G Q A N Y A A A N A | |
| TCCTCGACGCCCTCGCCACCCACCGCCACACCCAAGGACAACCCGCCACC | 4700 |
| F L D A L A T H R H T Q G Q P A T | |
| ACCATCGCCTGGGGCATGTGGCACACCACCACCACACTCACCAGCCAACT | 4750 |
| T I A W G M W H T T T T L T S Q L | |
| CACCGACAGCGACCGCGACCGCATCCGCCGCGGCGGCTTCCTGCCGATCT | 4800 |
| T D S D R D R I R R G G F L P I | |
| CGGACGACGAGGGCATGC | |
| S D D E G M | |

### EXAMPLE 3

### Recombinant PKS Genes for 13-desmethoxy FK-506 and FK-520

[0222] The present invention provides a variety of recombinant PKS genes in addition to those described in Examples 1 and 2 for producing 13-desmethoxy FK-506 and FK-520 compounds. This Example provides the construction protocols for recombinant FK-520 and FK-506 (from Streptomyces sp. MA6858 (ATCC 55098), described in U.S. Pat. No. 5,116,756, incorporated herein by reference) PKS genes in which the module 8 AT coding sequences have been replaced by either the rapAT3 (the AT domain from module 3 of the rapamycin PKS), rapAT12, eryAT1 (the AT domain from module I of the erythromycin (DEBS) PKS), or eryAT2 coding sequences. Each of these constructs provides a PKS that produces the 13-desmethoxy-13-methyl derivative, except for the rapAT12 replacement, which provides the 13-desmethoxy derivative, i.e., it has a hydrogen where the other derivatives have methyl.

[0223] FIG. 7 shows the process used to generate the AT replacement constructs. First, a fragment of ˜4.5 kb containing module 8 coding sequences from the FK-520 cluster of ATCC 14891 was cloned using the convenient restriction sites SacI and SphI (Step A in FIG. 7). The choice of restriction sites used to clone a 4.0-4.5 kb fragment comprising module 8 coding sequences from other FK-520 or FK-506 clusters can be different depending on the DNA sequence, but the overall scheme is identical. The unique SacI and SphI restriction sites at the ends of the FK-520 module 8 fragment were then changed to unique Bgl II and NsiI sites by ligation to synthetic linkers (described in the preceding Examples, see Step B of FIG. 7). Fragments containing sequences 5′ and 3′ of the AT8 sequences were then amplified using primers, described above, that introduced either an AvrII site or an NheI site at two different KS/AT boundaries and an XhoI site at the AT/DH boundary (Step C of FIG. 7). Heterologous AT domains from the rapamycin and erythromycin gene clusters were amplified using primers, as described above, that introduced the same sites as just described (Step D of FIG. 7). The fragments were ligated to give hybrid modules with in-frame fusions at the KS/AT and AT/DH boundaries (Step E of FIG. 7). Finally, these hybrid modules were ligated into the BamHI and PstI sites of the KC515 vector. The resulting recombinant phage were used to transform the FK-506 and FK-520 producer strains to yield the desired recombinant cells, as described in the preceding Examples.

[0224] The following table shows the location and sequences surrounding the engineered site of each of the heterologous AT domains employed (SEQ ID NOS:34-63, in order of appearance). The FK-506 hybrid construct was used as a control for the FK-520 recombinant cells produced, and a similar FK-520 hybrid construct was used as a control for the FK-506 recombinant cells.

| Hetero- | | |
|---|---|---|
| logous AT | Enzyme | Location of Engineered Site |
| FK-506 | AvrII | GGCCGTccgcgcCGTGCGGCGGTCTCGTCGTTC |
| AT8 | | G R P R R A A V S S F |
| (hydroxy- | NheI | ACCCAGCATCCCGCGATGGGTGAGCGgctcgcC |
| malonyl) | | T Q H P A M G E R L A |
| | XhoI | TACGCCTTCCAGCGGCGGCCCTACTGGatCgag |
| | | Y A F Q R R P Y W I E |
| rapamycin | AvrII | GACCGGccccgtCGGGCGGGCGTGTCGTCCTTC |
| AT3 | | D R P R R A G V S S F |
| (methyl- | NheI | TGGCAGTGGCTGGGGATGGGCAGTGCcctgcgG |
| malonyl) | | W Q W L G M G S A L R |
| | XhoI | TACGCCTTCCAACACCAGCGGTACTGGgtcgag |
| | | Y A F Q H Q R Y W V E |
| rapamycin | AvrII | GGCCGAgcgcgcCGGGCAGGCGTGTCGTCCTTC |
| AT12 | | G R A R R A G V S S F |
| (malonyl) | NheI | TCGCAGCGTGCTGGCATGGGTGAGGAactggcC |
| | | S Q R A G M G E E L A |
| | XhoI | TACGCCTTCCAGCACCAGCGCTACTGGctcgag |
| | | Y A F Q H Q R Y W L E |
| DEBS AT1 | AvrII | GCGCGAccgcgcCGGGCGGGGGTCTCGTCGTTC |
| (methyl- | | A R P R R A G V S S F |
| malonyl) | NheI | TGGCAGTGGGCGGGCATGGCCGTCGAcctgctC |
| | | W Q W A G M A V D L L |
| | XhoI | TACCCGTTCCAGCGCGAGCGCGTCTGGctcgaa |
| | | Y P F Q R E R V W L E |
| DEBS AT2 | AvrII | GACGGGgtgcgcCGGGCAGGTGTGTCGGCGTTC |
| (methyl- | | D G V R R A G V S A F |
| malonyl) | NheI | GCCCAGTGGGAAGGCATGGCGCGGGAgttQttG |
| | | A Q W E G M A R E L L |
| | XhoI | TATCCTTTCCAGGGCAAGCGGTTCTGGctgctg |
| | | Y P F Q G K R F W L L |

[0225] The sequences shown below provide the location of the KS/AT boundaries chosen in the FK-520 module 8 coding sequences. Regions where AvrII and NheI sites were engineered are indicated by lower case and underlining (SEQ ID NOS:64-65).

CCGGCGCCGTCGAACTGCTGACGTCGGCCCGGCCGTGGCCCGAGACCGACCGGccacggC
A G A V E L L T S A R P W P E T D R P R
GTGCCGCCGTCTCCTCGTTCGGGGTGAGCGGCACCAACGCCCACGTCATCCTGGAGGCCG
R A A V S S F G V S G T N A H V I L E A
GACCGGTAACGGAGACGCCCGCGGCATCGCCTTCCGGTGACCTTCCCCTGCTGGTGTCGG
G P V T E T P A A S P S G D L P L L V S
CACGCTCACCGGAAGCGCTCGACGAGCAGATCCGCCGACTGCGCGCCTACCTGGACACCA
A R S P E A L D E Q I R R L R A Y L D T
CCCCGGACGTCGACCGGGTGGCCGTGGCACAGACGCTGGCCCGGCGCACACACTTCGCCC
T P D V D R V A V A Q T L A R R T H F A
ACCGCGCCGTGCTGCTCGGTGACACCGTCATCACCACACCCCCCGCGGACCGGCCCGACG
H R A V L L G D T V I T T P P A D R P D
AACTCGTCTTCGTCTACTCCGGCCAGGGCACCCAGCATCCCGCGATGGGCGAGCAgctcg
E L V F V Y S G Q G T Q H P A M G E Q L
cCGCCGCCCATCCCGTGTTCGCCGACGCCTGGCATGAAGCGCTCCGCCGCCTTGACAACC
A A A H P V F A D A W H E A L R R L D N

[0226] The sequences shown below provide the location of the AT/DH boundary chosen in the FK-520 module 8 coding sequences. The region where an XhoI site was engineered is indicated by lower case and underlining (SEQ ID NOS:66-67).

TCCTCGGGGCTGGGTCACGGCACGACGCGGATGTGCCCGCGTACGCGTTCCAACGGCGGC
I L G A G S R H D A D V P A Y A F Q R R
ACTACTGGatcgagTCGGCACGCCCGGCCGCATCCGACGCGGGCCACCCCGTGCTGGGCT
H Y W I E S A R P A A S D A G H P V L G

[0227] The sequences shown below provide the location of the KS/AT boundaries chosen in the FK-506 module 8 coding sequences. Regions where AvrII and NheI sites were engineered are indicated by lower case and underlining (SEQ ID NOS:68-69).

TCGGCCAGGCCGTGGCCGCGGACCGGCCGTccgcgcCGTGCGGCGGTCTCGTCGTTCGGG
S A R P W P R T G R P R R A A V S S F G
GTGAGCGGCACCAACGCCCACATCATCCTGGAGGCCGGACCCGACCAGGAGGAGCCGTCG
V S G T N A H I I L E A G P D Q E E P S
GCAGAACCGGCCGGTGACCTCCCGCTGCTCGTGTCGGCACGGTCCCCGGAGGCACTGGAC
A E P A G D L P L L V S A R S P E A L D
GAGCAGATCGGGCGCCTGCGCGACTATCTCGAOGCCGCCCCCGGCGTGGACCTGGCGGCC
E Q I G R L R D Y L D A A P G V D L A A
GTGGCGCGGACACTGGCCACGCGTACGCACTTCTCCCACCGCGCCGTACTGCTCGGTGAC
V A R T L A T R T H F S H R A V L L G D
ACCGTCATCACCGCTCCCCCCGTGGAACAGCCGGGCGAGCTCGTCTTCGTCTACTCGGGA
T V I T A P P V E Q P G E L V F V Y S G
CAGGGCACCCAGCATCCCGCGATGGGTGAGCGgctCgcCGCAGCCTTCCCCGTGTTCGCC
Q G T Q H P A M G E R L A A A F P V F A
GACCCGGACGTACCCGCCTACGCCTTCCAGCGGCGGCCCTACTGGATCGAGTCCGCGCCG
D P D V P A Y A F Q R R P Y W I E S A P

[0228] The sequences shown below provide the location of the AT/DH boundary chosen in the FK-506 module 8 coding sequences. The region where an XhoI site was engineered is indicated by lower case and underlining (SEQ ID NOS:70-71).

GACCCGGACGTACCCGCCTACGCCTTCCAGCGGCGGCCCTACTGGatcgagTCCGCGCCG
D P D V P A Y A F Q R R P Y W I E S A P

### EXAMPLE 4

### Replacement of Methoxyl with Hydrogen or Methyl at C-15 of FK-506 and FK-520

[0229] The methods and reagents of the present invention also provide novel FK-506 and FK-520 derivatives in which the methoxy group at C-15 is replaced by a hydrogen or methyl. These derivatives are produced in recombinant host cells of the invention that express recombinant PKS enzymes the produce the derivatives. These recombinant PKS enzymes are prepared in accordance with the methodology of Examples 1 and 2, with the exception that AT domain of module 7, instead of module 8, is replaced. Moreover, the present invention provides recombinant PKS enzymes in which the AT domains of both modules 7 and 8 have been changed. The table below summarizes the various compounds provided by the present invention.

| Com- | | | |
|---|---|---|---|
| pound | C-13 | C-15 | Derivative Provided |
| FK-506 | hydrogen | hydrogen | 13,15-didesmethoxy-FK-506 |
| FK-506 | hydrogen | methoxy | 13-desmethoxy-FK-506 |
| FK-506 | hydrogen | methyl | 13,15-didesmethoxy-15-methyl-FK-506 |
| FK-506 | methoxy | hydrogen | 15-desmethoxy-FK-506 |
| FK-506 | methoxy | methoxy | Original Compound -- FK-506 |
| FK-506 | methoxy | methyl | 15-desmethoxy-15-methyl-FK-506 |
| FK-506 | methyl | hydrogen | 13,15-didesmethoxy-13-methyl-FK-506 |
| FK-506 | methyl | methoxy | 13-desmethoxy-13-methyl-FK-506 |
| FK-506 | methyl | methyl | 13,15-didesmethoxy-13,15-dimethyl- |
| | | | FK-506 |
| FK-520 | hydrogen | hydrogen | 13,15-didesmethoxy FK-520 |
| FK-520 | hydrogen | methoxy | 13-desmethoxy FK-520 |
| FK-520 | hydrogen | methyl | 13,15-didesmethoxy-15-methyl-FK-520 |
| FK-520 | methoxy | hydrogen | 15-desmethoxy-FK-520 |
| FK-520 | methoxy | methoxy | Original Compound -- FK-520 |
| FK-520 | methoxy | methyl | 15-desmethoxy-15-methyl-FK-520 |
| FK-520 | methyl | hydrogen | 13,15-didesmethoxy-13-methyl-FK-520 |
| FK-520 | methyl | methoxy | 13-desmethoxy-13-methyl-FK-520 |
| FK-520 | methyl | methyl | 13,15-didesmethoxy-13,15-dimethyl- |
| | | | FK-520 |

### EXAMPLE 5

### Replacement of Methoxyl with Ethyl at C-13 and/or C-15 of FK-506 and FK-520

[0230] The present invention also provides novel FK-506 and FK-520 derivative compounds in which the methoxy groups at either or both the C-13 and C-15 positions are instead ethyl groups. These compounds are produced by novel PKS enzymes of the invention in which the AT domains of modules 8 and/or 7 are converted to ethylmalonyl specific AT domains by modification of the PKS gene that encodes the module. Ethylmalonyl specific AT domain coding sequences can be obtained from, for example, the FK-520 PKS genes, the niddamycin PKS genes, and the tylosin PKS genes. The novel PKS genes of the invention include not only those in which either or both of the AT domains of modules 7 and 8 have been converted to ethylmalonyl specific AT domains but also those in which one of the modules is converted to an ethylmalonyl specific AT domain and the other is converted to a malonyl specific or a methylmalonyl specific AT domain.

### EXAMPLE 6

### Neurotrophic Compounds

[0231] The compounds described in Examples 1-4, inclusive have immunosuppressant activity and can be employed as immunosuppressants in a manner and in formulations similar to those employed for FK-506. The compounds of the invention are generally effective for the prevention of organ rejection in patients receiving organ transplants and in particular can be used for immunosuppression following orthotopic liver transplantation. These compounds also have pharmacokinetic properties and metabolism that are more advantageous for certain applications relative to those of FK-506 or FK-520. These compounds are also neurotrophic; however, for use as neurotrophins, it is desirable to modify the compounds to diminish or abolish their immunosuppressant activity. This can be readily accomplished by hydroxylating the compounds at the C-18 position using established chemical methodology or novel FK-520 PKS genes provided by the present invention.

[0232] Thus, in one aspect, the present invention provides a method for stimulating nerve growth that comprises administering a therapeutically effective dose of 18-hydroxy-FK-520. In another embodiment, the compound administered is a C-18,20-dihydroxy-FK-520 derivative. In another embodiment, the compound administered is a C-13-desmethoxy and/or C-15-desmethoxy 18-hydroxy-FK-520 derivative. In another embodiment, the compound administered is a C-13-desmethoxy and/or C-15-desmethoxy 18,20-dihydroxy-FK-520 derivative. In other embodiments, the compounds are the corresponding analogs of FK-506. The 18-hydroxy compounds of the invention can be prepared chemically, as described in U.S. Pat. No. 5,189,042, incorporated herein by reference, or by fermentation of a recombinant host cell provided by the present invention that expresses a recombinant PKS in which the module 5 DH domain has been deleted or rendered non-functional.

[0233] The chemical methodology is as follows. A compound of the invention (˜200 mg) is dissolved in 3 mL of dry methylene chloride and added to 45 μL of 2,6-lutidine, and the mixture stirred at room temperature. After 10 minutes, tert-butyldimethylsilyl trifluoromethanesulfonate (64 μL) is added by syringe. After 15 minutes, the reaction mixture is diluted with ethyl acetate, washed with saturated bicarbonate, washed with brine, and the organic phase dried over magnesium sulfate. Removal of solvent in vacuo and flash chromatography on silica gel (ethyl acetate:hexane (1:2) plus 1% methanol) gives the protected compound, which is dissolved in 95% ethanol (2.2 mL) and to which is added 53 μL of pyridine, followed by selenium dioxide (58 mg). The flask is fitted with a water condenser and heated to 70° C. on a mantle. After 20 hours, the mixture is cooled to room temperature, filtered through diatomaceous earth, and the filtrate poured into a saturated sodium bicarbonate solution. This is extracted with ethyl acetate, and the organic phase is washed with brine and dried over magnesium sulfate. The solution is concentrated and purified by flash chromatography on silica gel (ethyl acetate:hexane (1:2) plus 1% methanol) to give the protected 18-hydroxy compound. This compound is dissolved in acetonitrile and treated with aqueous HF to remove the protecting groups. After dilution with ethyl acetate, the mixture is washed with saturated bicarbonate and brine, dried over magnesium sulfate, filtered, and evaporated to yield the 18-hydroxy compound. Thus, the present invention provides the C-18-hydroxyl derivatives of the compounds described in Examples 1-4.

[0234] Those of skill in the art will recognize that other suitable chemical procedures can be used to prepare the novel 18-hydroxy compounds of the invention. See, e.g., Kawai et al., January 1993, Structure-activity profiles of macrolactam immunosuppressant FK-506 analogues, FEBS Letters 316(2): 107-113, incorporated herein by reference. These methods can be used to prepare both the C18-[S]-OH and C18-[R]-OH enantiomers, with the R enantiomer showing a somewhat lower IC₅₀, which may be preferred in some applications. See Kawai et al., supra. Another preferred protocol is described in Umbreit and Sharpless, 1977, JACS 99(16): 1526-28, although it may be preferable to use 30 equivalents each of SeO₂ and t-BuOOH rather than the 0.02 and 3-4 equivalents, respectively, described in that reference.

[0235] All scientific and patent publications referenced herein are hereby incorporated by reference. The invention having now been described by way of written description and example, those of skill in the art will recognize that the invention can be practiced in a variety of embodiments, that the foregoing description and example is for purposes of illustration and not limitation of the following claims.

1-20. (canceled)

21. An isolated nucleic acid comprising a nucleotide sequence encoding at least a domain of an extender module or at least a domain of a loading module of fkbB, wherein the nucleotide sequence is complementary to the nucleotide sequence of fkbB as set forth in SEQ ID NO: 73.

22. The isolated nucleic acid of claim 21, wherein said nucleic acid comprises a coding sequence identical or complementary to a sequence selected from the group consisting of:
nucleotides 44974-46573 of SEQ ID NO:1; nucleotides 43777-44629 of SEQ ID NO:1;
nucleotides 43144-43660 of SEQ ID NO:1; nucleotides 41842-43093 of SEQ ID NO:1;
nucleotides 40609-41842 of SEQ ID NO:1; nucleotides 39442-40609 of SEQ ID NO:1;
nucleotides 38677-39307 of SEQ ID NO:1; nucleotides 38371-38581 of SEQ ID NO:1;
nucleotides 37145-38296 of SEQ ID NO:1; nucleotides 35749-37144 of SEQ ID NO:1;
nucleotides 34606-35749 of SEQ ID NO:1; nucleotides 33823-34480 of SEQ ID NO:1;
nucleotides 33505-33715 of SEQ ID NO:1; nucleotides 32185-33439 of SEQ ID NO:1;
nucleotides 31018-32185 of SEQ ID NO:1; nucleotides 29869-31018 of SEQ ID NO:1;
nucleotides 29092-29740 of SEQ ID NO:1; nucleotides 28750-28960 of SEQ ID NO:1;
nucleotides 27430-28684 of SEQ ID NO:1; nucleotides 26146-27430 of SEQ ID NO:1;
nucleotides 24997-26146 of SEQ ID NO:1; nucleotides 24163-24373 of SEQ ID NO:1; and a sequence that encodes an amino acid sequence identical to that encoded by any of the foregoing sequences.

23. The isolated nucleic acid of claim 21, wherein the nucleotide sequence encodes an extender module, said module comprising a ketosynthase domain, an acyl transferase domain, and an acyl carrier protein domain.

24. The isolated nucleic acid of claim 21, wherein the nucleotide sequence encodes an open reading frame, said open reading frame comprising coding sequences for two or more extender modules, each extender module comprising a ketosynthase domain, an acyl transferase domain, and an acyl carrier protein domain.

25. The isolated nucleic acid of claim 21, wherein the nucleotide sequence encodes a gene cluster, said gene cluster comprising two or more open reading frames, each of said open reading frames comprising coding sequences for two or more extender modules, each of said extender modules comprising a ketosynthase domain, an acyl transferase domain, and an acyl carrier protein domain.

26. The isolated nucleic acid of claim 21, wherein said nucleic acid is contained in a recombinant vector capable of replication in or integration into the chromosome of a host cell.

27. The isolated nucleic acid of claim 26, that is selected from the group consisting of cosmid pKOS034-120, cosmid pKOS034-124, and cosmid pKOS065-C31.

28. The isolated nucleic acid of claim 21, wherein the nucleic acid encodes at least one loading module domain selected from the group of the CoA ligase, the enoylreductase (ER) domain, and the acyl carrier protein (ACP) domain.

29. A recombinant DNA vector capable of homologous recombination with the FK-520 polyketide synthase gene in a Streptomyces host cell that produces FK-520, wherein said vector comprises a nucleic acid sequence encoding at least a domain of an extender module or loading domain of the fkbB enzyme, wherein the amino acid sequence of fkbB is set forth as SEQ ID NO: 73.

30. The recombinant vector of claim 29, wherein the nucleic acid sequence encodes at least one domain selected from the group consisting of the CoA ligase domain of the loading domain, the ER domain of the loading domain, the ACP domain of the loading domain, the KS domain of the first extender module, the AT domain of the first extender module, the DH domain of the first extender module, the KR domain of the first extender module, the ACP domain of the first extender module, the KS domain of the second extender module, the AT domain of the second extender module, the DH domain of the second extender module, the ER domain of the second extender module, the ACP domain of the second extender module, the KS domain of the third extender module, the AT domain of the third extender module, the DH domain of the third extender module, the KR domain of the third extender module, the ACP domain of the third extender module, the KS domain of the fourth extender module, the AT domain of the fourth extender module, the DH domain of the fourth extender module, and ACP domain of the fourth extender module.

31. A method of preparing a polyketide, said method comprising transforming a host cell with the recombinant DNA vector defined in claim 26, and culturing said host cell under conditions such that a polyketide synthase is produced and catalyzes the synthesis of said polyketide.

32. The method of claim 31, wherein said host cell is a Streptomyces host cell.

33. The isolated nucleic acid of claim 23, wherein at least one of the ketosynthase domain, the acyl transferase domain or the acyl carrier protein domain is a domain of a module of a non-FK-520 polyketide synthase.

34. The isolated nucleic acid of claim 33, wherein said non-FK-520 polyketide synthase is rapamycin polyketide synthase, FK-506 polyketide synthase, or erythromycin polyketide synthase.

35. The recombinant vector of claim 29, wherein the nucleic acid sequence encodes at least one domain of an extender module of the fkbB enzyme and at least one domain of a non-FK-520 polyketide synthase.

36. The recombinant vector of claim 35, wherein the non-FK-520 polyketide synthase is rapamycin polyketide synthase, FK-506 polyketide synthase, or erythromycin polyketide synthase.

37. The recombinant vector of claim 35, wherein the non-FK-520 synthase domain is the AT domain of extender module 3, 12, or 13 of the rapamycin polyketide synthase.

38. The vector as in claim 35, wherein the non-FK-520 synthase domain is the AT domain of extender module 1 or 2 of the erythromycin polyketide synthase.

39. A recombinant host cell that expresses a modular recombinant polyketide synthase selected from the group consisting of: (i) FK-520 polyketide synthase in which at least one acyl transferase (AT) domain of fkbB is replaced by an AT domain of a non-FK-520 modular polyketide synthase; and (ii) FK-520 polyketide synthase in which at least one dehydratase (DH) domain of fkbB has been deleted, wherein the amino acid sequence of fkbB is set forth as SEQ ID NO: 73.

The application's sequence listing, which the Patent Office published only in electronic form, follows.

SEQUENCE LISTING (74 sequences)

SEQ ID NO: 1 - DNA, 77536 bp, Streptomyces hygroscopicus
  CDS (52275)...(71465)
gatctcaggcatgaagtcctccaggcgaggcgccgaggtggtgaacacctcgccgctgcttgtacggaccacttcagtcagcggcgattgcggaaccaagtcatccggaataaagggcggttacaagatcctcacattgcgcgaccgccagcatacgctgagttgcctcagaggcaaaccgaaagggcgcgggcggtccgcaccagggcggagtacgcgacgagagtggcgcacccgcgcaccgtcacctctctcccccgccggcgggatgcccggcgtgacacggttgggctctcctcgacgctgaacacccgcgcggtgtggcgtcggggacaccgcctggcatcggccgggtgacggtacggggagggcgtacggcggccgtggctcgtgctcacggccgccgggcggtcatccgtcgagacggcactcggcgagcagggacgcctggtcggcacctgcgggccggacgaccgtgtggttcgcgggcgggcggtggccggtggtgagccagctctccagggcggtgaaggctgagcggtgacacggcagcaaaggccggagtcggtcggggaaggtgtcgacgagggcgtcggtgtgcgtgccgtcctcgatgcggtagtagcggtaccggccgccaggccgctgccggacatacgcgcgtacacgtcggagcccgggcggcaggcagcagcacgtcgagagtgcctggatggtgatcagcggcttgccgatacgaccggtcaacgcgatgcgttccacggccgcgtggacgccggaggagcgggtggcgtagtcgtagtcggcatcgcagcccgggaccgtccccggggcgcaatacggtgtgccggcttccttctccccatcgaagccggggtcgaactcctcgcggtagacgcgctgcgtcagatcccagtagacctcgtggtggtacggccacaagaactcggagtcggccgggaacccggcgcggagcagcgcctcgcgcgcctggccggctgcggggccgcctgccgcgtaggtggggtagtcgcgcagggcggccggcaggaaggtgaagaggttgggaccctccgcgcgccacagggtgccttcccagtcgactcctccgtcgtacagctcgggatggttctccagctgccagcgcacgaggtagccgccgttggacatcccggtgaccagggtgcgctcgagcggccggtggtagcgctgggcgaccgacgcgcgggcggcccgggtcagctgggtgaggcgggtgttccactcggcgacggcgtcgcccggccgggagccatcacggtagaacgcggggccggtgttgcccttgtcggtggcggcgtaggcgtaaccgcgggcgagcacccagtcggcgatggcccggtcgttggcgtactgctcgcggttaccgggggtgccggccacgaccaggccaccgttccagcggtcgggcagccggatgacgaactgggcgtcgtggttccacccgtggttggtgttggtggtggaggtgtcggggaagtagccgtcgatctggatcccgggcactccggtgggagtggccaggttcttgggcgtcagccctgcccagtccgccgggtcggtgtggccggtggccgccgttcccgccgtggtcagctcgtccaggcagtcggcctgctgacgtgccgccgccgggacacgcagctgggacagacgggcgcagtgaccgtccggggcatcgggagcaggccgggccgtggccggtgaggggagcaggacggcgactgcggccagggtgagagcgccgaggccggtgcgtcttctcggggcccgtccgacaccgaggggcagaaccatggagagcctccagacgtgcggatggatgacggactggaggctaggtcgcgcacggtggagacgaacatgggtgcgcccgccatgactgaggcccctcagaggtgggccgccgccatgacgggcgcgggaccgcgggcgctccggggcggtgcccgcggccgccaccggttccgggtccccgggtcagggacaggtgtcgttcgcgacggtgaagtagccggtcggcgactctttcaaggtggtcgtgacgaaggtgttgtacaggcccatgttctggccggagcccttggcgtaggtgtaaccggcgctcgtcgtggcgcggcccgcctggacgtgagcgtagttgccggcggtccagcagacggccgtggcaccggtcgtctgcgcggtgaccgcgcccgagagcggtccggccttgccgtccgcgtcccgggcggcgaccgcgtaggtgtgcgatgtgcccgccctcaggccggtgtccgtgtacgacgtcgtggcggacgtggtgatctgggcaccgtcgcggtggacggcgtagtcggtggcgccgtcgacgggtttccaggtcaggctgatggtggtgtcggtggcgccggtggcggccaggccggacggagcgggcagcgaaccggggtcggaggcggatccgctcaggccgaagaactgcgtgatccagtagctggaacagatcgagtccaggaagtaggcggcgccggtgctgccgcactgctgtgctccggtgccgggatcgaccggggtgccgtgcccgatgcccggcacccggttcacctccacggccaccgatccgtccgcggccaggtactcctcgtgccgggtggagttcgggccgatcaccgaggtacggtccggcgtctgggacacgccgtgcacagcggtccactggtcgcgcaactcgtcggcgttgcgcggcgcgacggtggtgtccttgtcgccgtgccagatggccacgcgcggccacgggcccgaccacgaggggtagccgtcacggacccgccgcgcccactggtccgcggtcaggtcggtcccggggttcatgcacaggtacgcgctgctgacgtcggtggcacagccgaagggcaggccggcgacgaccgcgccggcctggaagacgtccggataggtggcgagcatcaccgacgtcatggcaccgccggcggacagcccggtgatgtaggtgcgctgggggtccgcgccgtaggcggagacggtgtgagcggccatctgccggatcgacgcggcttcgccctggcccctgcggttgtcgctgctctggaaccagttgaagcacctgttcgcgttgttcgacgacgtggtctcggcgaacacgagcaggaagccatagcggtccgcgaatgagagcaggccggagttgtcggcgtagccctgggcgtcctgggtgcaaccgtgcagggcgaacaccaccgccggctccgcgggcagggacgcgggccggtagacgtacatgttcagccggcccgggttcgtgccgaagtccgcgacctcggtcaggtccgccttggtcagaccgggcttggccaggcccgccgcggcgtgggccgtcggcgccgggccgagcagggccgctccgagtacgagggccacgacggccacgagacgggtgagcaccccccgccgtcccggacgcgacaacgacccgaccggcggcgaggaggagagggggaacagcggggtgaggattccccggaacggcggcggctgcatggcggctccctcgatgtcgtgggggggacacggagggctccctgacgtcgatcagtgggagcgccccggtgcccggcaccgtaggggtggttcaacccgcaacggtatggcccggagcaccacaccccgcaccgcgcgatgtgcgcccggacggattgtgtcgccttgcggaatctgatacccggacgcgacgaacgccccacccgacacgggtagggcgtcatggtgtccgactcggccggtcggccttgcctgccctggacggaccgggcgtcggcggaccgggcgtcggcgggctgggcggtatggcggccgaggacgccagccgcgtggggcggccgcgcccaagtgcagtacgccgaccgtggccggcgggagggccggaccggtcagtgcagtcccgcggccctgcgggaccgctcgtcccagacgggttccaccgcggcgaaccggggtccgtgtccgcggcggtagaccatcagtgtccgctcgaaggtgatgacgatgacaccgtcctggttgtagccgatggtgcgcacgctgatgatgcctacgtcaggtcggctggcggactcccgggtgttcaggacctcggactgcgagtagatggtgtcgccctcgaagaccgggttcggcagcctgacccggtcccagccgaggttggccatcacatgctgggagatgtcggtgacgctctgcccggtgaccagggcgagggtgaaggtggagtccaccagcggcttgccccaggtggtgcccgccgagtagtggcggtcgaagtgcagcggcgcggtgttctgcgtcaggagcgtgagccaggagttgtcggtctccaggaccgtgcggcccagggggtggcggtacacgtcgccggtggtgaagtcctcgaagtagcggccctgccagccctcgaccacagcggtgcgggtggcgtcctggtccgggttctcagtcgtcatggcgctcattctgggaagtccccggtccgctgtgaaatgccgaaccttcaccgggctcatacgtgcggcgcatgagccctggaccgtacgtagtcgtagaacctcgccaccactggcgcgcgtggtcctccggcgagtgtgaccacgccgaccgtgcgccgcgcctgcgggtcgtcgagcggcacggcgacggcgtggtcaccgggcccggacgggctgccggtgaggggggcgacggccacaccgaggccggcggcgaccagggcccgcagcgtgctcagctcggtgctctccaggacgacccgcggcacgaatccggccgcggcgcacagccggtcggtgatctggcgcagtccgaagaccggctccagtgccacgaacgcctcatcggccagctccgcggtccgcacccggcggcgtctggccagccggtgtccgggtgggacgagcaggcacagtgcctcgtcccgcagtggtgtccactccacatcgtccccggcgggtcgtgggctggtcagccccaggtccagcctgctgttgcggacgtcgtcgaccacggcgtcggcggcgtcgccgcgcagttcgaaggtggtgccgggagccagccggcggtacccggcgaggaggtcgggcaccagccaggtgccgtaggagtgcaggaaacccagtgccacggtgccggtgtcggggtcgatcagggcggtgatgcgctgctcggcgccggagacctcactgatcgcgcgcagggcgtgggcgcggaagacctcgccgtacttgttgagccggagccggttctggtgccggtcgaacagcggcacgcccactcgtcgctccagccgccggatggccctggacagggtcggctgggagatgttgagccgttccgcggtgatcgtcacgtgctcgtgctcggccaaggccgtgaaccactgcaactcccgtatctccatgcagggactatacgtaccgggcatggtcctggcgaggtttcgtcatttcacagcggccgggcggcggcccacagtgagtcctcaccaaccaggaccccatgggagggaccccatgtccgagccgcatcctcgccctgaacaggaacgccccgccgggcccctgtccggtctgctcgtggtttctttggagcaggccgtcgccgctccgttcgccacccgccacctggcggacctgggcgcccgtgtcatcaagatcgaacgccccggcagcggcgacctcgcccgcggctacgaccgcacggtgcgtggcatgtccagccacttcgtctggctgaaccgggggaaggagagcgtccagctcgatgtgcgctcgccggagggcaaccggcacctgcacgccttggtggaccgggccgatgtcctggtgcagaatctggcacccggcgccgcgggccgcctggcatcggccaccaggtcctcgcgcggagccaccgaggctgatcacctgcggacatatccggctacggcagtaccggctgctaccgcggaccgcaaggcgtacgacctcctggtccagtgcgaagcggggctggtctccatcaccggcacccccgagaccccgtccaaggtgggcctgtccatcgcggacatctgtgcggggatgtacgcgtactccggcatcctcacggccctgctgaagcgggcccgcaccggccggggctcgcagttggaggtctcgatgctcgaagccctcggtgaatggatgggatacgccgagtactacacgcgctacggcggcaccgctccggcccgcgccggcgccagccacgcgacgatcgccccctacggcccgttcaccacgcgcgacgggcagacgatcaatctcgggctccagaacgagcgggagtgggcttccttctgcggtgtcgtgctacaacgccccggtctctgcgacgacccgcgcttttccggcaacgccgaccgggtggcgcaccgcaccgagctcgacgccctggtgagcgaggtgacgggcacgctcaccggcgaggaactggtggcgcggctggaggaggcgtcgatcgcctacgcacgccagcgcaccgtgcgggagttcagcgaacacccccaactgcgtgaccgtggacgctgggctccgttcgacagcccggtcggtgcgctggagggcctgatccccccggtcaccttccacggcgagcacccgcggcggctgggccgggtcccggagctgggcgagcataccgagtccgtcctggcgtggctggccgcgccccacagcgccgaccgcgaagaggccggccatgccgaatgaactcaccggagtcctgatcctggccgccgtgttcctgctcgccggcgtacgggggctgaacatgggcctgctcgcgctggtcgccacctttctgctcggggtggtcgcactcgaccgaacgccggacgaggtgctggcgggtttccccgcgagcatgttcctggtgctggtcgccgtcacgttcctcttcgggatcgcccgcgtcaacggcacggtggactggctggtacgtgtcgcggtgcgggcggtgggggcccgggtgggagccgtcccctgggtgctcttcggcctggcggcactgctctgcgcgacaggcgcggcctcgcccgcggcggtggcgatcgtggcgccgatcagcgtcgcgttcgccgtcaggcaccgcatcgatccgctgtacgccggactgatggcggtgaacggggccgcagccggcagtttcgccccctccgggatcctgggcggcatcgtccactcggcgctggagaagaaccatctgcccgtcagcggcgggctgctcttcgcaggcaccttcgccttcaacctggcggtcgccgcggtgtcatggctcgtcctcgggcgcaggcgcctcgaaccacatgacctggacgaggacaccgatcccacggaaggggacccggcttcccgccccggcgcggaacacgtgatgacgctgaccgcgatggccgcgctggtgctgggaaccacggtcctctccctggacaccggcttcctggccctcaccttggcggcgttgctggcgctgctcttcccgcgcacctcccagcaggccaccaaggagatcgcctggcccgtggtgctgctggtatgcgggatcgtgacctacgtcgccctgctccaggagctgggcatcgtggactccctggggaagatgatcgcggcgatcggcaccccgctgctggccgccctggtgatctgctacgtgggcggtgtcgtctcggccttcgcctcgaccaccgggatcctcggtgccctgatgccgctgtccgagccgttcctgaagtccggtgccatcgggacgaccggcatggtgatggccctggcggccgcggcgaccgtggtggacgcgagtcccttctccaccaatggtgctctggtggtggccaacgctcccgagcggctgcggcccggcgtgtaccaggggttgctgtggtggggcgccggggtgtgcgcactggctcccgcggccgcctgggcggccttcgtggtggcgtgagcgcagcggagcgggaatcccctggagcccgtttcccgtgctgtgtcgctgacgtagcgtcaagtccacgtgccgggcgggcagtacgcctagcatgtcgggcatggctaatcagataaccctgtccgacacgctgctcgcttacgtacggaaggtgtccctgcgcgatgacgaggtgctgagccggctgcgcgcgcagacggccgagctgccgggcggtggcgtactgccggtgcaggccgaggagggacagttcctcgagttcctggtgcggttgaccggcgcgcgtcaggtgctggagatcgggacgtacaccggctacagcacgctctgcctggcccgcggattggcgcccgggggccgtgtggtgacgtgcgatgtcatgccgaagtggcccgaggtgggcgagcggtactgggaggaggccggggttgccgaccggatcgacgtccggatcggcgacgcccggaccgtcctcaccgggctgctcgacgaggcgggcgcggggccggagtcgttcgacatggtgttcatcgacgccgacaaggccggctaccccgcctactacgaggcggcgctgccgctggtacgccgcggcgggctgatcgtcgtcgacaacacgctgttcttcggccgggtggccgacgaagcggtgcaggacccggacacggtcgcggtacgcgaactcaacgcggcactgcgcgacgacgaccgggtggacctggcgatgctgacgacggccgacggcgtcaccctgctgcggaaacggtgaccggggcgatgtcggcggcggtcagcgtcagcgtcgtcggcgcgggcctcgcggagggctccagatgcaggcgttcgacgccggcggcggaagcgcccgccacctcggacacgcaggggcagtcggagtccgcgaagcccgcgaaccggtaggcgatctccatcatgcggttgcggtccgtacgccggaagtccgccaccaggtgcgcccccgcgcgggcgccctggtccgtgagccagttcaggatcgtcgcaccggcaccgaacgacacgacccggcaggacgtggcgagcagtttcaggtgccacgtcgacggcttcttctccagcaggatgatgccgacggcgccgtgcgggccgaagcggtcgcccatggtgacgacgaggacctcatgggcgggatcggtgagcacgcgcgcaggtcggcgtcggagtagtgcacgccggtcgcgttcatctggctggtccgcagcgtcagttcctcgacgcggctgagttcctcctcccccgcgggtgcgatcgtcatggagaggtcgagcgagcgcaggaagtcctcgtcgggaccggagtacgcctcccgggcctggtcgcgcgcgaaacccgcctggtacatcaggcggcgccgacgcgagtcgaccgtggacaccggcgggctgaactccggcagcgacaggagcgtggccgcctgctcggccgggtagcaccgcacctcgggcaggtggaacgccacctcggcacgctcggcgggctggtcgtcgatgaacgcgatcgtggtcggtgcgaagttcagctccgtggcgatctcgcggacggactgcgacttcggcccccatccgatgcgggccagcacgaagtactccgccacaccgaggcgttccagacgctcccacgcgaggtcgtggtcgttcttgctcgccaccgcctggaggatgccgcggtcgtcgagcgtggtgatcacctcgcggatctcgtcggtgaggaccacctcgtcgtcctccagcacggtgccccgccacaaggtgttgtccaggtcccagaccagacacttgacaatggtcatggctgtcctctcaagccgggagcgccagcgcgtgctgggccagcatcacccggcacatctcgctgctgccctcgatgatctccatgagcttggcgtcgcggtacgcccgttcgacgacgtgtccctctctcgcgcctgccgacgcgagcacctgtgcggcggtcgcggccccggcggcggctcgttcggcggcgacgtgcttggccaggatcgtcgcgggcaccatctcgggcgagccctcgtcccagtggtcgctggcgtactcgcacacgcgggccgcgatctgctccgcggtccacaggtcggcgatgtgcccggcgacgagttggtggtcgccgagcggccggccgaactgctcccgggtccgggcgtgggccaccgcggcggtgcggcaggcccgcaggatcccgacgcagccccaggcgaccgacttgcgcccgtaggcgagtgacgccgcgaccagcatcggcagtgacgcgccggagccggccaggaccgcgccggccggcacacgcacctggtccaggtgcagatcggcgtggccggcggcgcggcagccggacggcttcgggacgcgctcgacgcgtacgccgggggtgtcggcgggcacgaccaccaccgcaccggaaccatcctcctggagaccgaagacgaccaggtggtccgcgtaggcggcggcagtcgtccagaccttgtggccgtcgacgacagcggtgtccccgtcgagccgaacccgcgtccgcatcgccgacagatcgctgcccgcctgccgctcactgaagccgacggccgcgagtttcccgctggtcagctccttcaggaaggtcgcccgctgaccggcgtcgccgagccgctgcacggtccacgcggccatgccctgcgacgtcatgacactgcgcagcgaactgcagaggctgccgacgtgtgcggtgaactcgccgttctcccggctgccgagtcccagaccgccgtgctcggccgccacttccgcgcagagcaggccgtcggcgccgagccggacgagcaggtcgcgcggcagttcgccggacgtgtcccactcggcggcccggtcaccgacaaggtcggtcagcagcgcgtcacgctcaggcatcgacggcccgcagccggtggacgagtgcgaccatggactcgacggtacggaagttcgcgagctggaggtccgggccggcgatcgtgacgtcgaacgtcttctccaggtacacgaccagttccatcgcgaacagcgacgtgaggccgccctccgcgaacaggtcgcggtccacgggccagtccgacctggtcttcgtcttgaggaacgcgaccaacgcgtgcgcgacggggtcgtccttgacgggtgcggtcatgagaacaccttctcgtattcgtagaagccccggccggtcttccggccgtggtgtccctcgcggaccttgcccagcagcaggtcacaggggcggctgcgctcgtcgccggtgcgtttgtgcagcacccacagcgcgtcgacgaggttgtcgatgccgatcaggtccgcggtgcgcagcggcccggtcggatggccgaggcaccccgtcatgagcgcgtcgacgtcctcgacggacgcggtgccctcctgcacgatccgcgccgcgtcgttgatcatcgggtggagcagccggctcgtgacgaagccgggcgcgtcccggacgacgatcggcttgcgccgcagcgccgcgagcaggtccccggcggcggccatggccttctcaccggtccggggtccgcggatcacctcgaccgtcgggatcaggtacgacgggttcatgaagtgcgtgccgagcaggtcctcgggccgggccacggagtcggccagttcgtcaaccgggatcgacgacgtgttcgtgatgaccgggataccgggcgccgctgccgagaccgtggcgagtacctccgccttgacctcggcgtcctcgacgacggcctcgatcaccgcggtggccgtaccgatcgcgggcagcgcggacgtggccgtccgcagcacaccggggtcggcctcggcgggcccggccacgagttgtgccgtccgcagttcggtggcgatccgcgcccgcgccgccgtaaggatctcctcggacgtgtcgacgagtgtcaccgggacgccgtggcgcagcgcgagcgtggtgatgccggtgcccatcactcccgcgccgagcacgatcagctggtggtccacgctgtttcctccctccggggtcaccatggcagcgagtacgggtcgaggacgtcttccggggtcgacccgatcgcgtccttgcggccgaggccgagttcgtcggcgaagccgagcagcacgtcgaacgcgatgtggtcggcgaacgcgctgcccgtcgagtcgaggacgctcaggctgtcccggtggtccgccgcggtgtccggtgccgcgcacagggccgccagcgacgggccgagctcgcggtccggcagttgctggtactcgccctcggcgcgggcctgccccggatggtcgacgcagatgaacgcgtcgtcgagcagggtcttcggcagttcggtcttgcccggctcgtcggcgccgatggcgttcacatgcaggtgcggcagccgcggctcggcgggcagcaccggccctttgcccgagggcaccgaggtgacggtggacaggacatccgcggcggcggcggcctccgccggatcggtcaccttgaccggcagtccgaggaacgcgatgcggtccgcgaacgacgccgcgtggccggggtcggtgtcgctgaccaggatccgctcgatgggcaggaccctgctgagcgcgtgcgcctgggtcaccgcctgtgcgcccgcgccgatcagcgtgagcgtggcgctgtcggaccgggccagcagccggctcgcgacggcggcgaccgcgccggtccgcatcgcggtgatcacgcctgcgtcggcgagggcggtcagactgccgctgtcgtcgtcgaggcgcgacatcgtgccgacgatcgtcggcagccggaagcgcggatagttgtgcggactgtacgaaaccgtcttcatggtcacgccgacaccggggacccggtacggcatgaactcgatgacgccgggaatgtcgccgccgcggacgaatccggtacgcggcggcgcctcggcgaactcgccgcggccgagcgcggcgaacccgtcgtgcagctcgctgatcagccggtccatcatcacgtcgcggccgatcacggagagaatccgcttgatgtcacgttggcgcaggaccctggtctgcatgtgtcacctccctttcgtggccggagctgtcttggtggtgccgctcggggcggcttccgttctcatcgcagctccctgtcgatgaggtcgaaaatctcgtccgcggtcgcgtccgcggacagcacgccggccggcgtggtcgggcgggtctcccgccgccagcggttgagcagggcgtccagccgggttccgatcgcgtccgcctggcgggcgcccgggtcgacaccggcaacgagtgcttccagccggtcgagctgcgcgagcaccacggtcaccgggtcgtccggggacagcagttcaccgatgcggtcggcgagtgcgcgcggcgacgggtagtcgaagacgagcgtggcggacagtcgcagaccggtcgcctcgttgaggccgttgcgcagctgcaccgcgatgagcgagtccacaccgagttcccggaacgccgcgtcctccgggatgtcctccgggtcggcgtggcccaggacggccgctgccttctgccggacgagggcgagcaggtcggtggggcgttcctgctcgttgcgggcgctccggcgggccgacggcttgggccggccacgcagcagcgggaggtccggcggcaggtcgcccgccacggcgacgacactgcccgttccggtgtggacggcggcgtcgtacatgcgcatgccctgttcggcggtgagcgcgctcgccccacccttgcgcatacggcgccggtcggcgtcggtcaggtccgcggtcaggccactcgcctggtcccacagcccccacgcgatcgacagccctggcagcccttgtgcacgccggtgttcggcgagcgcgtcgaggaacgcgttcgccgccgcgtagttgccctgaccgggggtgcccagcacaccggccgccgacgagtagacgacgaatgcggcgaggtcggtgtcgcgggtgagccggtgcaggtgccaggcggcgtcggccttgggtttgaggacggtgtcgatgcggtcgggggtgaggttgtcgagcagggcgtcgtcgagggttccggcggtgtggaagacggcggtgaggggttgagggatgtgggcgagggtggtggcgagttggtgggggtcgccgacgtcgcaggggaggtgggtgccgggggtggtgtcggggggtggggtgcgggagaggaggtaggtgtgggggtggttcaggtggcgggcgaggatgccggcgagggtgccggagccgccggtgatgacgacggccccctcggggtccagcggccgcgggaccgtgaggacgatcttgccggtgtgctcgccgcggctcatggtcgccagcgcctcgcggacctgccgcatgtcgtgcaccgtcaccggcagcgggtgcagcacaccgcgcgcgaacaggccgagcagctccgcgatgatctccttgagccggtcgggccccgcgtccatcaggtcgaacggtcgctggacggcgtgccggatgtccgtcttccccatctcgatgaaccggccacccggcgcgagcaggccgacggacgcgtcgaggagttcaccggtgagcgagttgagcacgacgtcgaccggcgggaacgcgtcggcgaacgcggtgctgcgggaatcggccagatgcgctccgtccaggtccaccagatggcgcttcgcggcgctggtggtcgcgtacacctccgcgcccaggtgccgcgcgatctgccgggcggcggaaccgacaccgccggtggccgcgtggatcaggaccttctcgccggggcgcagcccggcgaggtcgaccaggccgtaccacgcggtcgcgaacgcggtcatcacggacgccgcctgcgggaacgtccagccgtccggcatccggccgagcatccggtggtcggcgatgaccgtggggccgaagccggtgccgacgaggccgaagacgcggtcgcccggtgccagaccggagacgtcggcgccggtctccaggacgatgcccgcggcctcgccgccgagcacgccctgaccggggtaggtgccgagcgcgatcagcacatcgcggaagttgaggcccgccgcacgcacaccgatccggacctcggccggggcgagggggcgccggggctccgccgagtcggccgcggtgaggccgtcgagggtgcccgtccgcgccggccggatcagccacgtgtcgctgtccggcacggtgagcggctccggcacccgggtgaggcgggccgcctcgaaccggccgccgcgcagccgcagacgcggctcgccgagtgcgacggcgatgcgctgctgctcgggggcgagcgtgacgccggactcggtctcgacgtggacgaaccggccgggctgctcggcctgggcggcgcgcagcagtccggccgccgcgccggtggcgaggcccgcggtggtgtgcacgagcagatccccgccggagccggtcagggcggtcagcagccgggtggtgagcgcacgcgtctcggccaccgggtcgtcgccatcagcggcaggcaacgtgatgacgtccacgtcggtcgcggggacatccgtgggtgcggcgacctcgatccaggtgagacgcatcaggccggtgccgacgggtggggacagcgggcgggtgcggaccgtccggatctcggcgacgagttggccggcggagtcggcgacgcgcagactcagctcgtcgccgtcacgagtgatcacggctcggagcatggccgagcccgtggcgacgaaccgggcccccttccaggcgaacggcagacccgcagcgctgtcgtccggcgtggtgagggcgacggcgtgcagggccgcgtcgagcagcgccggatgcacaccgaaaccgtccgcctcggcggcctgctcgtcgggcagcgccacctcggcatacacggtgtcaccatcacgccaggcagcccgcaacccctggaacgccgacccgtactcataaccggcatcccgcagttcgtcatagaaccccgagacgtcgacggccacggccgtgaccggcggccactgcgagaacggctccacaccgacaacaccgggggtgtcgggggtgtcgggggtcagggtgccgctggcgtgccgggtccagctgcccgtgccctcggtacgcgcgtggacggtcaccggccgccgtccggcctcatcagccccttccacggtcaccgacacatccaccgctgcggtcaccggcaccacaaggggggattcgatgaccagctcgtccactatcccgcaaccggtctcgtcaccggcccggatgaccagctccacaaacgccgtacccggcagcaggaccgtgccccgcaccgcgtgatcagccagccaggggtgagtgcgcaatgagatccggccagtgagaacaacaccaccatcgtcggcgggcagcgctgtgacagcggccagcatcggatgcgccgcacccgtcaaccccgccgccgacagatcggtggcaccggccgcctccagccagtaccgcctgtgctcgaacgcgtacgtgggcagatccagcagccgtcccggcaccggttcgaccaccgtgtcccagtccactgccgtgcccagggtccacgcctgcgccaacgccgtcagccaccgctcccagccgccgtcaccggtccgcaacgacgccaccgtgtgagcctgctccatcgccggcagcagcaccggatgggcactgcactccacgaacaccgacccatccagctccgccaccgccgcgtccaacgccaccggacgacgcagattccggtaccagtacccctcatccaccggctccgtcacccaggcgctgtccacggtcgaccaccacgccaccgacgcggccttccctgccaccccctccagtaccttggccagttcatcctcgatggcttccacgtggggcgtgtgggaggcgtagtcgaccgcgatacgacgcacccgcacgccttcggcctcataccgcgccaccacctcctccaccgccgacgggtcccccgccaccaccgtcgaagccgggccgttacgcgccgcgatccacacaccctcgaccagaccgacctcaccggccggcaacgccaccgaagccatcgctccccgcccggccagtcgcgccgcgatgacctgactgcgcaatgccaccacgcgggcggcgtcctcgaggctgagggctccggccacgcacgccgccgcgatctcgccctgggagtgtccgatcaccgcgtccggcacgaccccatgcgcctgccacagcgcggccaggctcaccgcgaccgcccagctggccggctggaccacctccacccgctccgccacatccggccgcgccaacatctcccgcacatcccagcccgtgtgcggcagcaacgcctgagcgcactcctccatacgcgcggcgaacaccgcggagtgggccatgagttccacgcccatgccgacccactgggcgccctggccggggaagacgaacaccgtacgcggctggtccaccgccacacccgtcacccgggcatcgcccagcagcaccgcacggtgaccgaagacagcacgctcccgcaccaacccctgcgcgaccgcggccacatccacaccacccccgcgcagatacccctccagccgctccacctgcccccgcagactcacctcaccacgagccgacaccggcaacggcaccaacccgtcaacaaccgactccccacgcgacggcccaggaacaccctcaaggatcacgtgcgcgttcgtaccgctcaccccgaacgacgacacacccgcatgcggtgcccgatccgactcgggccacggcctcgcctcggtgagcagctccaccgcaccggccgaccagtccacatgcgacgacggctcgtccacatgcagcgtcttcggcgcgatcccgtaccgcatcgccatgaccatcttgatcacaccggcgacacccgccgccgcctgcgcatgaccgatgttcgacttcaacgaacccagcagcagcggaacctcacgctcctgcccgtacgtcgccagaatggcctgcgcctcgatgggatcgcccagcgtcgtccccgtcccgtgcgcctccaccacgtccacatcggcggcgcgcagtccggcgttcaccaacgcctgctggatgacacgctgctgggacgggccgttgggggcggacagcccgttggaggcaccgtcctggttcaccgccgacccgcggacgaccgcgagaacggtgtgtccgttgcgctcggcgtcggagagccgctccagcacaagaacgccggcgccctccgcccagccggtgccgttggcggcgtccgcgaacgcgcggcagcggccgtcgggggagagtccgccctgctgctggaattccacgaacccggtcggggtcgccatgacggtgacaccgccgaccagcgccagcgagcactccccgtggcgcagtgcgtgcccggcctggtgcagcgcgaccagcgacgacgagcacgccgtgtccaccgtgaacgccggtccctggagcccatagaagtacgagatccggccggtgagcacgctgggctgcatgccgatcgagccgaacccgtccaggtccgcgccgacgccgtacccgtacgagaaggcgcccatgaacacgccggtgtcgctgccgcgcagtgtgcccggcacgatgcccgcgctctcgaacgcctcccatgtcgtttccagcaggatccgctgctgggggtccatggcccgtgcctcacgggggctgatgccgaagaacgcggcatcgaagccggcggcgtcggagaggaagccgccgcggtccgtgtccgatccgccggtgaggccggacgggtcccagccacggtcggccgggaagccggtgaccgcgtcgccgccactgtccaccatgcgccacaggtcgtcgggcgaggtgacgccgcccggcagtcggcaggccatgcccacgatggccagcggttcgtcacgggtcgcggcggctgtgggaacagcgaccggtgcggcaccaccgaccagagcctcgtccaaccgcgacgcgatggcccgcggcgtcgggtagtcgaagacaagcgtggcgggcagtcggacaccggtcgccgcggcgagtcggttccgcagttcgacggcggtcagcgagtcgatacccagttccttgaaggccgcgtccgcggacacgtccgcggcgtccgcgtggccgagcaccgccgccgcgttgtcgcggaccagtgccagcagcgcggtgtcccgctcagcgccggacatggtgccgagccggtcggcgagcggaacggcggtggccgccgccgggcgcgatacggcgcggcgcagatcggcgaaaagcggcgatgtgtgcgcggtgaggtccatcgtggccgccacggcgaacgcggtgccggttccggccgcggcttccagcaggcgcatgcccacaccggccgacatggggcggaaaccgccgcggcggacacgggtgcggttggtgccgctcatgctgccggtgagtccgctgtcatcggcccagaggccccaggccagcgacagcgcgggcagtccttcggcatggcgcagcgtcgcgagtccgtcgaggaacccgttcgccgccgagtagttgccctggccgcggccgcccatgatgcccgcgacggacgagtagaggacgaacgagcgcaggtccgcgtcccgggtcagctcgtgcaggtgccaggcgccgtcggctttggggcgcagtgtggtggcgagccgctccggggtgagtgccgtggtcacgccgtcgtcgagcacggctgccgtgtggaagaccgccgtgagcggcctgccggcggcggcgagcgcggcggcgagctggtcccggtcggcgacgtcacagcggatgtggacaccgggagtgtccgccggcggttcgctgcgcgacagcaacaggaggtggcgggcgccatgctcggcgacgagatgccgggcgaggagacctgccagcacacccgagccgccggtgatgaccaccgtgccgtccgggtcgagcagcggttcgggcgtttccgcggcggccgtgcgggtgaaccgcggcgcttcgtaccggccgtcggtgacgcggacgtacggctcggccagtgtcgtggcggcggccagcgcctcgatgggggtgtcggtgccggtctccaccagcacgaaccggcccgggtgctcggcctgggcggaccggacgaggccggcgaccgctcctccgaccggtcccgcgtcgatccggacgacgagggtggtctccgcagggccgtcctcggcgatcacccggtgcagctcgccgagcacgaactcggtgagccggtacgtctcgtcgaggacatccgcgcccggttccgggagcgcggagacgatgtggaccgcgtccgcaggaccgggcccgggagtgggcagctcggtccaggagaggccgtacaaggagttccgtacgacggcggcgtcgccgtcgacgttcaccggtcgcgcggtcagcgcggcgacggtcaccaccggttggccgaccgggtccgtcgcatgcacggcagcgccgtccgggccctgagtgatcgtgacgcgcagcgtggtggccccggtcgtgtggaaccgcacgccgctccacgagaacggcagccgcacctccgcttcctgttccgcgagcagcggcaggcaggtgacgtgcaaggccgcgtcgaacagcgccgggtggacgccatagtgcggcgtgtcgtccgcctgttccccggcgatctccacctcggcgtacagggtttcgccgtcgcgccaggcggtgcgcagtccctggaacgctgggccgtagctgtagccggtctcggccagccgctcgtagaacgcgctcacgtcgacgcgtcgcgcgcccggcggcggccacgcgggcggcgggaccgccgcgacgcttccggcccggccgagggtgccgctggcgtgccgggtccagctgtccgtgccctcggtacgcgcgtggacggtcactcgccgccgtccggcctcatcggccccttcgacggtcaccgacacatccaccgcgccggtcaccggcaccacgagcggggtctcgatgaccagttcatccaccaccccgcaaccggtctcgtcaccggcccggatgaccagctccacaaacgccgtacccggcagcagaaccgtgccccgcaccgcgtgatcagccagccagggatgcgtacgcaacgagatccggccagtgagaacaacaccaccaccgtcgtcggcgggcagtgctgtgacggcggccagcatcggatgcgccgccccggtcagcccggccgcggacagatcggtggcaccggccgcctccagccagtaccgcctgtgctcgaacgcgtaggtgggcagatcgagcagccgtcccggcaccggttcgaccaccgtgtcccagtccactgccgtgcccagggtccacgcctgcgccaacgccgtcagccaccgctcccagccgccgtcaccggtccgcaacgacgccaccgtgtgagcctgttccatcgccggcagcagcaccggatgggcgctgcactccacgaacacggacccgtccagctccgccaccgccgcgtccagcgcgacggggcgacgcaggttccggtaccagtagccctcatccaccggctcggtcacccaggcgctgtccaccgtggaccaccaggccaccgacccggtcccgccggaaatcccctccagtacctcggccaactcgtcctcgatggcttccacgtggggcgtgtgggaggcgtagtcgaccgcgatacggcgcactcgcacgccttcggcctcgtaccgcgtcaccacttcttccaccgcggacgggtcccccgccaccacagtcgaagacgggccgttacgcgccgcgatccacacgccctcgaccaggtccacctcaccggccggcaacgccaccgaagccatcgccccccgcccggccagccgcccggcgatcacctggctgcgcaaggccaccacgcgggcggcgtcctcaaggctgagggctccggccacacacgccgccgcgatctcgccctgggagtgtccgaccaccgcgtccggcacgaccccatgcgcctgccacagcgcggccaggctcaccgcgaccgcccagctggccggctggaccacctccacccgctccgccacatccggccgcgccaacatctcccgcacatcccagcccgtgtgcggcaacaacgcccgcgcacactcctccatacgagccgcgaacaccgcagaacacgccatcaactccacacccatgcccacccactgagcaccctgcccgggaaagacgaacaccgtacgcggctgatccaccgccacacccatcacccgggcatcgcccaacaacaccgcacggtgaccgaagacagcacgctcacgcaccaacccctgcgcgaccgcggccacatccacaccacccccgcgcagatacccctccagccgctccacctgcccccgcagactcacctcactccgagccgacaccggcaacggcaccaacccatcgacagccgactccccacgcgacggcccgggaacaccctcaaggatcacgtgcgcgttcgtaccgctcaccccgaaagcggagacaccggcccggcgcggacgtcccgcgtcgggccacgcccgcgcctcggtgagcagttccaccgcgccctcggtccagtccacatgcgacgacggctcgtccacatgcagcgtcttcggcgcgatgccataccgcatcgccatgaccatcttgatgacaccggcgacacccgcagccgcctgcgcatgaccgatgttcgacttcaacgaacccagcagcagcggaacctcacgctcctgcccgtacgtcgccagaatcgcgtgcgcctcgatgggatcgcccagcgtcgtccccgtcccgtgcgcctccaccacgtccacgtcggcgggggcgagccccgccttgtggagggcctggcggatgacgcgctgctgggaggggccgttgggtgcggagatgccgttggaggcgccgtcctggttgacggcggaggagcggacgaccgcgaggacggtgtgtccgttgcgctcggcgtcggagagcttttcgacgacgaggacgccggccccctcggcgaaaccggtgccgtccgccgcgtcagcgaacgccttgcaccgtccgtccggcgcgacgccgccctgccgggagaactccacgaaggtctgtggtgatgccatcactgtgacaccaccgaccagcgccagcgagcactccccggtccgcagcgcctgcccggcctggtgcagcgcgaccagcgacgacgaacacgccgtgtcgaccgtgaccgccggaccctccatgccgaagaagtacgacagccgtccggcgagcaccgcgggctgtgtgctgtaggcgccgaatccgcccaggtccgcgcccgtgccgtagccgtagtagaagccgccgacgaagacgccggtgtcgctgccgcgcagggtgtccggcacgatgccggcgtgttcgagcgcctcccaggcgatttcgaggaggatccgctgctgcgggtcgagtgcggtggcctcgcgcggactgatgccgaagaacgcggcatcgaagtcggcggcgcccgcgagtgcgccggcccgcccggtggcggactcggcggcggcgtgcagcgcggccacgtcccagccgcggtcggtggggaagtcgccgatcgcgtcgcggccgtccgcgacgagctgccacagctcttccggtgaggtgacgccgcccggcagtcggcaggccatgccgacgacggcgagcggctcgttcgccgcggcgcgcagcgcggtgttctcccggcggagctgcgcgttgtccttgaccgacgtccgcagcgcctcgatcaggtcgttctcggccatcgcctcatcccttcagcacgtgcgcgatgagcgcgtctgcgtccatgtcgtcgaacagttcgtcgtccggctccgcggtcgtggtgctcgcgggtgcctgtgccggtggttcaccgccgtccggggtcccgttgtcgtccggggtcccgttgacgtccggggccaggagggtcagcagatgacgggtgagcgcgccggcggcgggatagtcgaagacgagcgtggccggcagcggaatgccgagggcctcggagagccggttgcgcaggccgagcgcggtgagcgagtcgaccccgaggtccttgaacgccgtggtggccgtgaccgccgccgcgtcggtgtggcccagcagggtggcggcggtgtcgcggacgacgccgagcagcacctgttcccgttccttgtggggcaggtccggcaggcgttccagcagggagccgccgtcggtcgcggagcgccgggtggggcgctggatcggtcgccacagcggtgacgggtcgccgggcccgggtggggcggtcgccacgaccacggcttccccggtggcgcacgcggcgtcgaggaggtcggtcagccggtccgccgcggcggtgaacgccacggccggcaggccttgtgcccggcgcaggtcggccagggcctggagcggtccggccgcctcgccggacggaacggcgagaacgaacgcggtcaggtcgaggtcgcgggtcaggcggtgcagttcccaggccgactcggcggtgccgtccgcgtggacgaccgcggtcaccggggtttccggcactgtgcccggctcgtaccggatcacttcggcgccgtgtccgccgaggtgtccggcgagttcctccgaaccgcccgcgaggaggacggtgtcgccgtacgaggccgcggccgtggtgggcgcggcggggacgaggcggggcgcttcgaggcgcccgtcggccaggcgcaggtgcggttcgtcgaggcgggagagggcggcggcgcggcggggggtgaccgtgtcggtggtctccacgagcacgagccggcccggttccgcggtgtcgagcagtgcggcgacggcaccggcgacgggcccggcctcggcggacaccaccagcgtggcgccggcggtcctcgggtcgtccagtgcggtacggacctcgtcgggaccggataccgggacgacgatgacgtcgggcgtggcgtcgtcgccgaggtcggtgtaccggcgggccgtggtgccgggtgccgccggggcccggacgccggtccaggtgcgccggaacagccgcacgtccccgtccgggcccgtcgtggcggggggccgggtgatgagcgagccgatctgagccaccggccgtcccagttcgtcggcgaggtgcacgcgggcgccgccctcgccctcgccgtggacgaaggtgacgcgcagtttcgtggcgccgctggtgtggacacggacgccggtgaacgcgaacggcaaccgtacccccgcgttctcggcggccgcgccgatgctgcccgcttgcagcgcggtgacgagcagcgccgggtgcagtgtgtagcgggcggcgtccctggcgagggcgccgtcgagggcgacttcggcgcagacggtgtctccgtggctccacgcggcggacatgccgcggaactcggggccgaactcgtatcccgcgtcgtcgagtcgctggtagaaggccgcgacgtcgaccggttccgcgtgctcgggcggccagggccccggcgtggtggccggttcggtggtggcgatgccggcgaagccggaggcgtggcgggtccatgtccggtcgccgtccgtccgggcgtggacgcgcacggcacggcgtccggtgtcgtcgggcgcggcgacggtcacgcgcacctggacggcgccggtggcgggcaggaccagcggtgtctcgacgaccagttcgtcgagcaggtcgcagcctgcctcgtcggcgccgcgtccggccaattccaggaaggcgggtccgggcagcagtacggcgccgtcgacggagtgaccggccagccatgggtgggtggccagcgagaaccggccggtgagcagcacctcgtcggagtcggggagcgccaccgacgcggcgagcagcgggtggtcgacggcgtcgagtccgaggccggaagcgtccgtgccggccgcggtctcgatccagtagcgctcatggtggaaggcgtatgtgggcaggtcgtgtgccgtcgccgtcgcggggacgaccgccgcccagtcgacgggcacgccggttgtgtgcgcctcggccagcgcggtgagcagccggtggactcccccgccgcggcggagcgtggcgacggtcgcgccgtcgatcgcgggcagcagcacggggtgcgcgctgacctcgacgaacacggtgtcacccggctcgcgggcagcggtcacggccgtggcgaagcctacggggtggcgcatgttgcggaaccagtactcgtcgtcgagcggcgcgtcgatccagcgttcgtcggcggtggagaaccacgggatctcgggcgtgcgcgaggtggtgtccgcgacgatccgctggagttcgtcgtacagcgggtcgacgaacggggtgtgggtcgggcagtcgacggcgatgcggcgcacccagacgccgcgggcctcgtagtcggcgatcagcgtttcgacggcgtccgggcgcccggcgacggtcgtggtggtggcgccgttgcggcccgcgacccagacgccgtcgatccgggcggcatccgcctcgacgtcggcggccgggagcgcgaccgagcccatcgcgccgcgtccggcgagttcgcgcaggagcaggagaacgctgcgcagcgcgacgaggcgggcaccgtcctccagggtgagcgctccggcgacacaggccgcggcgatctcgccctgggagtgtccgatgacggcgtccgggcgtacgcccgcggcctcccacacggcggccagcgacaccatgacggcccagcagacggggtgcacgacgtcgacgcggcgggtcacctccgggtcgtcgagcatggcgatggggtcccagcccgtgtgcgggatcagcgcgtcggcgcattggcgcatcctggcggcgaacaccggggaggccgccatcagttcgacgcccatgccgcgccactgcggtccttgtccggggaagacgaagacggtgcgcggctcggtgagcgccgtgccggtgacgacgtcgtcgtcgagcagcacggcgcggtgcgggaacgtcgtacgcctggcgagcaggcccgcggcgatggcgcgcgggtcgtggccgggacgggcggcgaggtgctcgcggagtcggcggacctggccgtcgagggccgtggcggtccgcgccgagacgggcagtggtgtgagcggcgtggcgatcagcggctcaccgggcttcgaggccgacggctcctcggccggcggctccccggccgggtgggcttccagcaggacgtgggcgttggtgccgctgacgccgaaggaggacacaccggcgcgccgcgggcggtcggtctcgggccagggccgggcatcggtgaggagttcgacggcgccggccgtccagtcgacgtgcgaggacggcgtgtccacgtgcagggtgcgcggcagggtgccgtgccgcatggcgaggaccatcttgatgacaccggcgacacccgcggcggcctgagtgtggccgatgttggacttcagcgagcccagcagcaccggggtgtcgcgcccctgcccgtaggtggccagcaccgcctgtgcctcgatgggatcgcccagcctggtgccggtgccgtgcgcctccacggcgtccacgtccgccggggtgagcccggcgttggccagggcctgccggatcacccgctcctgcgagggcccgttcggcgccgacaacccgttggaagcaccgtcctggttgaccgccgaaccccggacaaccgccagcacacggtggccgttgcgctcggcatcggagagcctctcgacgatcagcacaccggacccctcggcgaaaccggtgccgtcagccgcatccgcgaacgccttgcagcgcgcgtcgggcgcgagaccccgctgctgggagaactcgacgaagccggacggcgaggccatcaccgtgacgccgccgaccagggcgagcgagcattcgccggagcgcagtgactgcccggcctggtgcagcgccaccagcgacgacgaacacgccgtgtcgaccgtgaccgccggaccctccagaccgtagaagtacgacagccgaccggacagcacactggtctgggtgccggtcgcgccgaaaccgcccaggtcggtgccgagtccgtacccgtcggagaaggcgcccatgaacacgccggtgtcgcttccgcgcagcgactccgggaggatcccggcgtgttccagcgcctcccacgaggtctccaggaccagacgctgctgcgggtccatcgccagcgcctcacgcggactgatcccgaagaacgccgcgtcgaagtccgccaccccggcgaggaagccaccatgacgcacggtcgacgtgcccggatgatccggatcgggatcgtacagcccgtccacgtcccaaccacggtccgtcggaaacgccgtgatcccgtcaccacccgactccagcagccgccacaagtcctccggcgacgcgaccccacccggcagccggcaggccatccccacgatcgccaacggctcgtcctgccggacggccgcggtcgtggtgcgggtcggcgatgccgtccggccggacagcgccgcggtgagcttcgccgcgacggcgcgcggcgtcgggaagtcgaagaccgcggtggcgggcagccgtacgcccgtcgcctcggtgaaggcgttgcgcagccggatcgccatgagcgagtcgacgccgagttccttgaacgtggcggtcgcctcgacccgtgcggcaccgtcgtggccgagtacggccgcggtgcactgccggacgacggcgagcacgtccttttcggcgtccgcggcggagagccgcgcgatccggtcggcgagggtggtggcgccggccgcccggcgccgcggctcccggcgcggtgcgcgcagcaggggcgagctgccgaggccggccgggtcggcggcgaccagcgccgggtccgaggaccgcaacgccgcgtcgaacagcgtcagtccgccttcggcggtcagcgccgtcacgccgtcgcggcgcatgcgggcgccggtgccgaccgtcagcccgctctccggttcccacaggccccaggccacggacaacgcgggcagtccggctgcccggcgctgttcggccagcgcgtcgaggaacgcgttcgcggccgcgtagttgccctgtccggggctgccgagcacaccggcggccgacgagtagaggacgaacgcggccagttccgtgtcctgggtgagttcgtgcaggtgccacgcggcgtccaccttcgggcgcagcaccgtctcgagccggtcgggggtgagcgcggtgaggacgccgtcgtcgaggacggccgcggtgtgcacgacggccgtgagcgggtgcgccgggtcgatccccgccagtacggaggcgagttcgtcccggtcggcgacgtcgcaggcgatcgccgtgacctcggcgccgggcacgtcgctcgccgtgccgctgcgcgacagcatcagcagccggcgcacgccgtggcgttcgacgaggtggcggctgatgatgccggccagcgtcccggagccaccggtgacgagcacggtgccgtccgggtcgagcgccggagcgtcacccgccgggaccgccggggccagacggcgggcgtacacctggccgtcacgcagcaccacctggggctcatcgagcgcggtggccgctgcgagcagcggctcggcggtgtccggggcggcgtcgacgaggacgatccggccggggtgttcggcctgcgcggtccgcaccagtccggcggccgcggccgacgcgagaccgggcccggtgtggacggccaggaccgcgtcggcgtaccggtcgtcggtgaggaagcgctgcacggcggtcaggacgccggcgcccagttcgcgggtgtcgtcgagcggggcaccgccgccgccgtgcgcggggaggatcaccacgtccgggaccgtcgggtcgtcgaggcggccggtcgtcgcggtcgtgggcggcagctccgggagctcggccagcaccgggcgcagcaggcccggaacggctcccgtgatcgtcagggggcgcctgcgcacggcgccgatggtggcgacgggcccgccggtctcgtccgcgaggtgtacgccgtcagcggtgacggcgacgcgtaccgccgtggcgccggtggcgtggacgcggacgtcgtcgaacgcgtacggaaggtggtccccttccgcggcgaggcggagtgcggcgccgagcagcgccgggtgcaggccgtaccgtccggcgtcggcgagctgtccgtcggcgagggccacttccgcccagacggcgtcgtcgtcggcccagacggcgcgcgggcggggcagcgcgggcccgtccgtgtacccggctcgggccagacggtcggcgatgtcgtcggggtccaccggccgggccgtggcgggcggccacgtcgacggcatctcccgcacggccggggccgtccgcgggtcgggggcgaggattccgtgcgcgtgctcggtccactcccccgccgcgtgccgcgtgtgcacggtgaccgcgcggcggccgtccgccccgggcgcgctcaccgtgacggagagcgcgagcgcaccggaccgcggcagcgtgaggggggtgtccacggtgaacgtgtcgagggcgccgcagccggcttcgtcgcccgcccggatcgccagatccaggagggccgcggcgggcagcaccgcgaggccgtgcagggagtgcgccagcggatcggcggcgtcgacccggccggtgagcaccaggtcgccggtgccgggcagggtgaccgccgcggtcagcgccgggtgcgcgaccggcgtctgtccggccggggccgcgtcgcccgcggtctgggtgccgagccagtagcggacccgctcgaacgggtacgtcggcgggtgcgaggcgcgtgccggcgcggggtcgatgaccttcggccagtcgaccgtgacgccgtcggtgtgcagccgggcgagcgcggtcagggcggatcgcggttcgtcgtcggcgtgcagcatcgggatgccgtcgacgagtcgggtcaggctccggtccgggccgatctccaggagcaccgccccgtcgtgcgcggcgacctgttccccgaaccggacggtgtcgcggacctgtcgtacccagtactccggcgtggtgcaggcggcgcccgcggccatcgggatcctcggctcgtggtacgtcaggctctccgcgaccttgcggaactcctcgagcatcggctccatccgcgccgagtggaacgcgtggctggtccgcaggcgggtgaagcggccgagccgggccgcgacgtcgagcaccgcctcctcgtcaccggagagcacgatcgacgcgggcccgttgaccgcggcgatctccacgccgtcccgcagcagcggcagcgcgtcccgttccgacgcgatcacggcggccatcgccccgccggacggcagcgcctgcatcaggcgggcccgtgcggacaccagcctgcacgcgtcctccagggaccagacgccggcgacgtacgcggcggccagctcgccgatcgaatggcccacgaaggcgtccgggcgtacgccccacgcctcgagctgtgcgccgagtgcgacctggagcgcgaacaccgcgggctgggcgtacccggtgtcgtggaggtcgagcccggcgggcacgtcgagggcgtccagcacctcgcggcgagtgcgggcgaagacgtcgtaggcggcggccagtccgtcgcccatgccgggacgttgtgagccctgtccggagaagagccacacgaggcggcggtccggttctgcggcgccggtgaccgtgtcggtgccgatcagcgcggcccggtgcgggaaggccgtgcgggcgagcagggccgcggccaccgcgcgctcgtcctcctcgccggtggcgaggtgggcgcgcaggcggtgtacctgtgcgtcgagtgcctgcggggtgcgtgccgagagcagcaggggcagcggtccggtgtcgggtgccggggcgggttcgggggccggtcgggggtggctttcgaggatgatgtgagcgttggtgccgctaacgccgaaggaggacaccccggcgcgccgtgggcggtcggtttcgggccaggggcgggcgtcggtgaggagttcgacggcgccggccgtccagtcgacgtgcgaggacggcgtgtccacgtgcagggtgcgcggcagggtgccgtgccgcatggcgaggaccatcttgatgacaccggcgacgcccgcggcggcctgagtgtggccgatgttggacttcagcgagcccagcagcaccggggtgtcgcgatgctgcccgtaggtggccagtaccgcctgcgcctcgatggggtcgcccagcctggtcccggtgccatgcgcctcgacagcgtccacatccgccggggtgagcccggcgttggccagcgcctgccggatcacccgctcctgcgacggcccgttcggcgccgacaacccgttggaagcaccgtcctggttgaccgccgaaccacgcacgaccgccaggacattgtggccgtgccgctcggcgtcggagagcctctcgacgatcagcacaccggatccctcggcgaaaccggtgccatcagccgcatccgcgaacgccttgcagcggccgtccggggagaggccccgctgctgggagaagtccacgaagccggacggcgaggccatcaccgtgacgccgccgaccacggcgagcgagcactcccccgagcgcagcgactgcccggcctggtgcagcgccaccagcgacgacgaacacgccgtgtccaccgtgaccgccggaccctccaaaccgtagaagtacgacagccgaccggacagcacactggtctgggtgctggtggcaccgaaaccgccgcggtcggctccagtgccgtacccgtagaagtagccgcccatgaacacgccggtgtcgcttccgcgcagcgactccgggaggatcccggcgtgttccagcgcctcccacgaggtctccaggaccagacgctgctgcgggtccatcgccagcgcctcacgcggactgatcccgaagaacgccgcgtcgaagtccgccaccccggcgaggaagccaccatgacgcacggtcgacgtgcccggatgatccggatcgggatcgtacagcccgtccacgtcccaaccacggtccgtcggaaacgccgtgatcccgtcaccacccgactccagcagccgccacaagtcctccggcgacgcgaccccacccggcagccggcaggccatccccacgatcgccaacggctcgtcctgccggacggccgcggtcggggtacgccgccgggtggtggcccgcgcgccggccagttcgtccaggtgggcggcgagcgcctgcgccgtggggtggtcgaagacgagcgtagcgggcagcgtcaggcccgtcgcgtcggccagccggttgcgcagttcgacgccggtcagcgagtcgaagcccacttccctgaacgcgcgcgcgggtgcgatggcgtgggcgtcgcggtggccgagcaccgcggcagcgctggtacggacgaggtcgagcatgtcgcgcgcggccggaggtgcggacgtgcgccggacggccggcacgagggtgcgtaggaccggcgggacccggtcggacgcggcgacggcggcgaggtcgagccggatcggcacgagcgcgggccggtcggtgtgcagggccgcgtcgaacagggcgagcccctgtgcggccgtcatcggggtcatgccgttgcgggcgatgcgggccaggtcggtggcggtcagccgcccgcccatcccgtccgccgcgtcccacagtccccaggcgagcgagacggcgggcagcccctggtggtgccggtggcgggcgagcgcgtcgaggaacgcgttgccggtcgcgtagttggcctgacccgcgccgccgaacgtggcggatatggacgagtacaggacgaacgcggccaggtcgagatcgcgcgtcagctcgtgcaggtgccaggcgacgtccgccttgacccgcagcacggcgtcccactgctccggccgcatggtcgtcacggccgcgtcgtcgacgatcccggccatgtgcacgacggcgcgcagccgctgggcgacgtcggcgacgactgcggccagctcgtcgcggtcgacgacgtcggcggccacgtaccgcacgcggtcgtcctccggcgtgtcgccgggccggccgttgcgggacaccacgacgacctcggcggcctcgtgcacggtgagcaggtggtccacgaggaggcggccgagcccgccggtgccgccggtgacgaggacggtcccgccggtcagcggggaggttccggtggccgcggcgacacggcgcagacgggccgcacgcgctgtgccgtcggcgacccggacgtgcggctcgtcgccggcggcgagcccggccgctatggcggcgggcgtgatctcgtccgcttcgatcagggcgacgcggccgggatgctccgtctccgccgtccggaccaggccgccgagcgcttcctgcgcgggatcgccggtacgggtggccacgatgagccgggatcgcgcccagcgcggctcggcgagccaggtctgcacggtggtgagcaggtcgcggcccagctcccgggtccgggcgccgggcgaggtgcccgggtcgccgggttccacggccaggaccacgaccggggggtgctcgccgtcgggcacgtcggcgaggtacgtccagtcggggacgggtgacgcgggcacgggcacccaggcgatctcgaacagcgcctcggcatcggggtcggcggcccgcacggtcaggctgtcgacgtcaaggaccggtgagccgtgctcgtccgtggcgacgatgcggaccatgtcggggccgacgcgttccagcagcacgcgcagcgcggtcgcggcgcgcgcgtggatcctcacgccggaccaggagaacgccagccggcgccgctccgggtccgtgaagaccgtcccgagggcgtgcagggccgcgtcgagcagcacggggtgcagcccgtaccgggcgtcggtgagctgttcggcgaggcggaccgacgcgtaggcgcggccctcccccgtccacatcgcggtcatggcccggaacgcgggcccgtacgagagcggcagcgcgtcgtagaagccggtcaggtcggccgggtcggcgtcggcgggcggccagtccacgggctccgccggaccgccagtgtccacgctcagcgctccggtcgcactgagcgcccaggggcccgtgccggtacggctgtgcagactcaccgaccgccgtccggacacctcggttccgacggtggcctggatctccgtgtcgccgtcgccgtcgaccaccaccggcgcgacgatggtcagctccgcgatctccggcgtgccgagccgggctcccgcttcggcgagcagttccacgagcgccgagccgggcacgatgacccggccgtccacctcgtggtcggcgagccagggctgacggcgtaccgagacaccgcggtggccagcgcgccctcgccgtcgggcgaggtcgacccacgagccgagcagcgggtggccggacgttcccgccggttccgcgtcgatccagtagcggtcacggcggaacgggtacgtgggcagcggcaccacccgacgcgtcgcgaacgaccaggtgacgggcacgccccggacccagagcgcggcgagcgaccgagtgaagcggtccaggccgccctcgcctcgccgcagtgtgccggtgacgaccgtatgcgcatgcccggcgagcgtgtcctccagtgcggtggtgagcacgggatgcgcgctgacctcgacgaacgcgcggtatccgcggtccgccaggtggccggtcgcggcggcgaaccgaacggtgcggcgcaggttgtcgtaccagtaggcggcgtccgcgggccggtccagccacgcctcgtccacggtggagaagaacgggacgtccggcgtgcgcggagtgatgccggcgagagcgtcgagcagcgcgccgcggatcgtttcgacatgcgcggtgtgcgacgcgtagtcgacggcgatccggcgggcgcggggggtggcggccagcagctcctccacggcgtcggccgcaccggcgacaacgatcgacgcgggtccgttgaccgcggcgacctccaggcgcccggcccacacggcggcgtcgaagtcggcgggcggcaccgagaccatgccgccctgcccggccagttcggtggcgacgagtcggctgcgcaccgcgacgaccttcgcggcgtcgtccagggtgagcaccccggcgacgcaggccgcggcgacttcgccctgggagtggccgacgaccgcggccggggcgaccccgtgcgcacgccacagctccgccagcgccaccatcaccgcgaacgacgcgggctgcacgacatcgacccggtcgaacgcgggcgctccgggccgctgggcgatgacgtccagcaggtcccatccggtgtgcggggcgagcgccgtggcgcactcgcggagccgccgggcgaacacgggctcggtggcgagcagttcggcacccatgccggcccactgggagccctgcccggggaacgcgaacacgacacgtgtgtcggtgacgtcggcggttcccgtcacggcccccggcacttcggcaccacgggcgaacgcctccgcctctcgggccggcacgaccgcccggtggcgcatggccgtccgggtggtggcgagcgagtggccgaccgcggccgcggcgccagtgagcggggccagctgtcccgcgacgtcccgcagtccctccggggtccgggccgacatcggccagaccacgtcctcgggcaccggctcggcttcgggtgcggacacgggtgcgggcgcggcggggggcccggcctccaggacgacatgggcgttggtgccgctgatgccgaacgacgagacacccgcacgccgggcgcgcccggtgaccggccacggctcactgcggtgcagcagccggatgtcgccgtcccagtcgacgtgccgggacggctcgtcgacgtgcagcgtgcgcggcaggacgccgtgccgcatcgccatgaccatcttgatgacgccggcgacgccggccgcggcctgggtgtggccgatgttcgacttgagcgagccgatcagcagcggatgcacgcgttcgcgcccgtaggccacttgcagggcctgggcctcgacggggtcgccgagacgggtgccggtgccgtgtgcctccacggcgtcgacgtcacccggcgccaggccggcgtcggcgagcgcacgctggatgacgcgctgctgcgcaggcccgttcggggcggacagcccgttcgacgcgccgtcggagttgaccgcggagccgcgcaccagcgccagcacggggtggccgtggcgggtggcgtcggagagccgctccagcaccaggacaccggcgccctcggcgaagctcgtgccgtccgcggtgtccgcgaaggccttggcacggccgtcgggggcgagcccgcgctgccgggagaactcgacgaacccggtcgtcgtcgccatcaccgtgacaccgccgaccagggcgagcgagcactcccccgagcgcagcgaccgcgcggcctggtgcagcgccaccagcgacgacgaacacgccgtgtcgacggtgaccgacgggccctccagaccgaagtagtacgagagccgcccggagagaacgctggtcggcgtgccggtcgccccgaaaccgcccaggtccacgcccgcgccgtagccctgggtgaacgcgcccatgaatacgccggtgtcgctgccgcggacgctttcgggcaggatgcccgctcgttcgaacgcctcccacgacgcttcgaggaccagacgctgctgcgggtccatcgccagcgcctcacgcgggctgatcccgaagaacgcggcgtcgaagtcggcggcgccggtgaggaagccgccgtgacgcacggaaaccttgccgaccgcgtcggggttcgggtcgtagagcgcggcgaggtcccagccgcggtcggcggggaactcggtgatcgcgtccccgccggagtcgaccagccgccacaggtcctccggtgaccgcacgccaccgggcatccggcacgccatggccacgatcgccagcggctcgttccccgccaccgtcggtgcgggcactgtcgccgccggagcggcaggggccggctcaccccgccgttcctcatccaggcgggcggcgagcgcggccggtgtcgggtggtcgaagacggccgtcgcggagagccgtacccccgtcgtctcggcgaggctgttgcgcaaccggacaccgctgagcgagtcgatgccgaggtccttgaacgccgtcgtgggcgtgatctcggaggcgtcggcgtggccgagcacggcggccgtggccgcacacacgatggccagcaggtcacgatcgcggtcgcggtcgcggtcgcggttgtcctccgcacgggcggcgatgcggcgctcggtccgctgccggacgggctcggtgggaatcgccgcgaccatgaacggcacgtccgcggcgaggctcgcgtcgatgaagtgggtgccctcggcctcggtgagcggccggaacccgtcgcgcacccgctgccggtcggcgtcgtcaagttgtccggtgagggtgctggtggtgtgccacatgccccaggcgatggaggtggcgggttggccgagggtgtggcggtgggtggcgagggcgtcgaggaaggcgttggcggcggcgtagtttccttgtccggggctgccgaggacggcggcggcgctggagtagaggacgaagtgggtgaggggttggttttgggtgaggtggtgcaggtgccaggcggcgttggctttggggtggaggacggtggtgaggcggtcgggggtgagggcgtcgaggatgccgtcgtcgagggtggcggcggtgtggaagacggcggtgaggggttgggggatgtgggcgagggtggtggcgagttggtgggggtcgccgacgtcgcaggggaggtgggtgccgggggtggtgtcggggggtggggtgcgggagaggaggtaggtgtgggggtggttcaggtggcgggcgaggatgccggcgagggtgccggagccgccggtgatgatgatggcgtgttcggggttgaggggggtggtggtgggtggggtggtggtgtggaggggggtgaggtggggtcggtggagggtgtggtgggtgaggcggaggtgggggtggtcgagggtggcgagttgggccagggggaggggagtgtgggggtggtcggtttcgatgaggcggatgcggtgggggtgttcgttctgggcggtgcgggtgaggccggtgacggtggcgccggcggggtcggtggtggtgtggacgatgagggtgtggtcggtggtggtgaggtggtgttgcagggcggtcaggacgcgggtggcgcgggtgtgggcgcgggtgggtatgtcctcggggtcgtcggggtgggcggcggtgatcaggacgtgtccctcgggcaggtcaccgtcgtagaccgcctcggcgaccgcgagccactccaaccggagcgggttcggccccgacggggtgtcggcccgctccctcagcaccagcgagtccaccgacacgacaggacggccatccgggtcggccacgcgcacggcgacgccggcctccccccgggtgagggcgacgcgcaccgcggcggccccggtggcgttcaggcgcacgcccgtccaggagaacggcagctcgatcccgccgcccgcgtcgaggcgcccggcgtgcagggccgcgtcgagcagtgccggatgcacaccgaaaccgtccgcctcggcggcctgctcgtcgggcagcgccacctcggcatacacggtgtcaccatcacgccaggcagcccgcaacccctggaacgccgacccgtactcataaccggcatcccgcagttcgtcatagaaccccgagacgtcgacggccgcggccgtggccggcggccactgcgagaacggctcaccggaagcgttggaggtatccggggtgtcgggggtcagggtgccgctggcgtgccgggtccagctgcccgtgccctcggtacgcgcgtggacggtcaccggccgccgtccggcctcatcggccccttccacggtcaccgacacatccaccgctgcggtcaccggcaccacgagcggggattcgatgaccagttcatccaccaccccgcaaccggtctcgtcaccggcccggatgaccagctccacaaacgccgtacccggcagcagaaccgtgccccgcaccgcgtgatcagccagccagggatgcgtacgcaatgagatccggccggtgagaacaacaccaccaccgtcgtcggcgggcagtgctgtgacggcggccagcatcggatgcgccgccccggtcagcccggccgcggacaggtcggtggcaccggccgcctccagccagtaccgcctgtgctcgaacgcgtaggtgggcagatccagcagccgccccggcaccggttcgaccaccgtgccccagtccacccccgcacccagagtccacgcctgcgccaacgcccccagccaccgctcccagccaccgtcaccagtccgcaacgacgccaccgtgcgggcctgttccatcgccggcagcagcaccggatgggcactgcactccacgaacaccgacccgtccagctccgccaccgccgcatccagcgcgacagggcgacgcaggttccggtaccagtacccctcatccaccggctcggtcacccaggcgctgtccacggtcgaccaccacgccaccgacccggtcccgccggaaattcccttcagtacctcagcgagttcgtcctcgatggcctccacgtgaggcgtgtgggaggcgtagtcgaccgcgatacgacgcacccgcaccccatcagcctcataccgcgccaccacctcctccaccgccgacgggtcccccgccaccaccgtcgaagccggaccattacgcgccgcgatccacacaccctcgaccagacccacctcaccggccggcaacgccaccgaagccatcgccccccggccggccagccgcgccgcgatcacccgactgcgcaacgccaccacgcgggcggcgtcctccaggctgagggctccggccacacacgccgccgcgatctccccctgcgagtgtccgaccacagcgtccggcacgaccccatgcgcctgccacagcgcggccaggctcaccgcgaccgcccagctggccggctggaccacctccacccgctccgccacatccgaccgcgacaacatctcccgcacatcccagcccgtgtgcggcaacaacgcccgcgcacactcctccatacgagccgcgaacaccgcggaacggtccatgagttccacgcccatgcccacccactgggcaccctgcccggggaagacgaacaccgtacgcggctgatccaccgccacacccatcacccgggcatcacccagcagcaccgcacggtgaccgaagacagcacgctcacgcaccaacccctgcgcgaccgcggccacatccaccccacccccgcgcagatacccctccagccgctccacctgcccccgcagactcacctcaccacgagccgacaccggcaacggcaccaacccatcaccacccgactccacacgcgacggcccaggaacaccctccaggatcacgtgcgcgttcgtaccgctcaccccgaacgacgacacacccgcatgcggtgcccgatccgactcgggccacggcctcgcctcggtgagcagctccaccgcaccggccgaccagtccacatgcgacgacggctcgtccacgtgcagcgtcttcggcgcgatcccatgccgcatcgccatgaccatcttgatgacaccggcgacacccgcagccgcctgcgcatgaccgatgttcgacttgaccgaaccgaggtagagcggcgtgtcgcggtcctgcccgtaggccgcgaggacggcctgcgcctcgatcgggtcgcccagccgcgtgccggtgccgtgcgcctccaccacgtccacatcggcggcgcgcagtccggcgttgaccaacgcctgccggatcacgcgctgctgggcgacgccgttgggggcggacagtccgttggaggcaccgtcctggttcaccgccgagccgcggacgaccgcgagaacggtgtgcccgttgcgctcggcgtcggagagccgctccagcacgagaacgccgacgccctcggcgaagccggtcccgtccgccgcgtcggcgaacgccttgcaccgtccgtccggggagagtccgcgctgccgggagaactccacgagctctgcggtgttcgccatgacggtgacaccgccgaccagcgccagggagcactccccggcccgcagtgcctgtgccgcctggtgcagggcgaccagcgacgacgagcacgccgtgtcgaccgtgaccgccgggccctgaagtccgtacacgtacgagaggcgcccggacaggacgctcgtctgcgtcgccgtgacaccgagcccgcccaggtcccggccgacgccgtagccctggttgaacgcgcccatgaacacgccggtgtcgctctcccggagcctgtccggcacgatgccggcgttctcgaacgcctcccaggaggtctccaggatcaggcgctgctgggggtccatcgccagcgcctcgttcggactgatgccgaagaacgcggcgtcgaacccggcgccggccaggaatccgccgtggcgtgtcgtggagcggccggccgcgtccgggtccgggtcgtacagcgcgtcgacgtcccagccccggtcggtggggaactcggtgatcgcctcggtaccggcggcgacgagccgccacaggtcctccggcgaggcgaccccgccgggcagtcggcacgccatgccgacgatcgcgacggggtcgccggagccgagggtctgggcggtcgcgggtgccgctgtcgcggagccggcgaggtgggcggcgaacgcacgcggagtggggtggtcgaacgcggttgacgcgggcacccgcagacccgtccgcgcggcgacggtgttggtgaactcgacggtggtgagcgagtcgaggccgttctcgcggaacgtgcggtccggggagcagtgtccggcgcccggcaggcccaggacggtggcgacgctgtcgcggaccaggtcgagcagtacgtcctcccggcccgcacgggccgcggcgaggcggttcgcccactcctgttccgtggcgtcgggctcggccggtccggtcagtgcggtgaggatcggcggcgtggcgcccgccatcgtcgcggcccgcgccccggcggaaccggtccgggccacgatgtacgagccgccgcccgcgatggccttctcgatcaggtcgccggtgagcgccggccgttcgatgccgggcagcgcgcggacggtgacggtggggagtccctccgcggcccgtggccgggtgtgggcgtcggcgccggccgggccgtcgagcaggacgtgcacgagcgcgccggggttcgcggcttcctcggctgcggtggtcacgtgggtgaggccggtctcgtcgcggagcaggccggcgacggtgtcggcgtcctccccggtgaccaggaccggcgcgtccgggccgatcggaggcggcacggtgaggaccatcttgccggtgtgccgggcgtggctcatccacgcgaacgcgtcccgcgcacggcggatgtcccacggctgcaccggcagcgggcacagctcaccgcggtcgaacaggtcgaggagcagttcgaggatctcccgcaggcgcgcgggatccacgtcggccaggtcgaacggctgctgggcggcgtggcggatgtcggtcttgcccatctcgacgaaccggccgcccggtgcgagcaggccgatggacgcgtcgaggagttcaccggtgagcgagttgagcacgacgtcgaccggcgggaaggtgtcggcgaacgcggcgctgcgggagttcgccacatggtcggtgtcgaagccgtcggcgtgcagcaggtgttgtttggcgggactggcggtggcgtacacctcggcgccgaggtggcgggcgatccgggtcgccgccatgccgacaccgcccgtcgcggcgtggaccaggaccttctggccgggtcgcagctcgcccgcgtcgacgaggccgtaccaggcggtggcgaacacgatgggcacggacgcggcgatggggaacgaccatccccgtgggatccgtgcgaccagccgccggtccgcgaccacgctgcgccggaacgcgtcctgcacgagaccgaacacgcggtcgccgggggccaggtcgtcgacgccgggtccgacttcggtcacgatgcccgcggcctccccgcccatctcgccctcgcccgggtaggtgccgagcgcgatcagcacgtcgcggaagttcagccccgcggcgcggacgtcgatgcggacctcgccggcggccaggggcgcggcgggacgtcgagcggggcgacgacgaggtcgcggagcgttccggaggcgggcgggcgcagcgcccactggcgcggtcggcaggggggtggtgtccgcgcgtaccagccggggcacgtaggccacgccggcccgcagcgcgatctggggttcgccgagcgaggccgcggcggggacgaggtcgtcatcgccgtccgtgtccaccagcacgaacgatccgggttcggcggcctggcggcgcagcgcctcgtcccagagccgggcctggtccgcgtccgggatctcggccgggccgacgcccaccgcgcggcgggtgacgaccgtccggcggggtgacggggtgccgggcaggtcgcgccgctcccagaccagttcgcacagcgtggcctcgccactgccggtggcgaccagatgggccggcagccccgcgagccgcgcgcgctggaccttgcccgacgcggtgcgggggatcgtggtgacgtgccagatctcgtcgggcaccttgaagtaggcgagccggcggcggcactcggcgaggatcgcctcggcggggacgcgggggccgtcggaaacgacgtagagcacgggtatgtcgccgaggacggggtgcgggcggcccgccgcggcggcgtcccggacaccggccacctcctgggcgacggtctcgatctcccgggggtggatgttctccccgccgcggatgatcagctccttgacccggccggtgatcgtcacgtgtccggtctcggcctgacgtgcgaggtccccggtgcggtaccagccgtccacgagcacctgggcggtcgcctccggctgggcgtggtagccgagcatgaggctcggcccgctcgcccacagctcgccctcctcgccgggtgccacgtcggcgccggacaccgggtcgacgaaccgcagcgacaggcccggcacgggcagcccgcacgagccgggaacccgcgcatcctccagggtgttggcggtgagcgagccggtcgtctcggtgcagccgtacgtgtcgagcaggggcacgccgaacgtcgcctcgaaatccctggtgagcgacgccggcgaggtggatccggcgaccagcgccacgcgcagcgcgcgagcccgcggctcgccggacacggcgccgaggaggtagcggtacatcgtcggcacgccgacgagcacggtgctggagtgttcggccagggcgtcgaggacgtcacgcgcgacgaagccgcccaggatacgggcggacgcgccgaccgtgaggacggcgagcaggcagaggtggtggccgaggctgtggaacagcggggcgggccagagcagttcgtcgtcctcggtcagccgccaggacggcacgtcgcagtgcatcgcggaccacaggccgctgcgctgtgcggaaaccacgcccttgggacggccggtggtgccggaggtgtagagcatccaggcgggttcgtccaggccgaggtcgtcgcggggcgggcacggcggctcggtcccggcgaggtcctcgtaggagacgcagtccggtgcccggcgcccgacgagcacgacggtggcgtcggtgccggtgcggcgcacctggtcgaggtgggtttcgtcggtgaccagcacggtcgcgccggagtccgtcaggaagtgggcgagttcggcgtcggcggcgtccgggttgagcgggacggcgacggcggcggcgcgggcggcggcgaggtagacctcgatggtctcgatccggttgccgagcagcatcgcgacccggtcgccgcggtcgacgccggacgcggcgaggtgtccggcgagccggccggcccggagccggagttgcgtgtacgtcacggcgcgttgggaatccgtgtaggcgatccggtcgccgcgtcgctcggcatggatgcggagcaattcgtgcaacggccggattggttccacacgcgccatggaaacacctttctctcgaccaaccgcacaacagcacggaaccggccacgagtagacgccggcgacgctagcagcgttttccggaccgccaccccctgaagatccccctaccgtggccggcctccccggacgctcatctagggggttgcacgcataccgccgtgcgtaattgccttcctgatgaccgatgccggacgccagggaagggtggaggcgttgtccatatctgtcacggcgccgtattgccgcttcgagaagaccggatcaccggacctcgagggtgacgagacggtgctcggcctgatcgagcacggcaccggccacaccgacgtgtcgctggtggacggtgctccccggaccgccgtgcacaccacgacccgtgacgacgaggcgttcaccgaggtctggcacgcacagcgccctgtcgagtccggcatggacaacggcatcgcctgggcccgcaccgacgcgtacctgttcggtgtcgtgcgcaccggcgagagcggcaggtacgccgatgccaccgcggccctctacacgaacgtcttccagctcacccggtcgctggggtatcccctgctcgcccggacctggaactacgtcagcggtatcaacacgacgaacgcggacgggctggaggtgtaccgggacttctgcgtgggccgcgcccaggcgctcgacgagggcgggatcgacccggccaccatgcccgcggccaccggtatcggcgcccacgggggcggcatcacctgcgtgttcctcgccgcccggggcggagtgcggatcaacatcgagaaccccgccgtcctcacggcccaccactacccgacgacgtacggtccgcggcccccggtcttcgcacgggccacctggctgggcccgccggaggggggccggctgttcatctccgcgacggccggcatcctcggacaccgaacggtgcaccacggtgatgtgaccggccagtgcgaggtcgccctcgacaacatggcccgggtcatcggcgcggagaacctgcggcgccacggcgtccagcgggggcacgtcctcgccgacgtggaccacctcaaggtctacgtccgccgccgcgaggatctcgatacggtccgccgggtctgcgccgcacgcctgtcgagcaccgcggccgtcgcccttttgcacaccgacatagcccgcgaggatctgctcgtcgaaatcgaaggcatggtggcgtgacaatacccggtaaaaggcccgcgacgctgcgcctcggcggatccgcgaagagaaagaagagcgtcaccgcacagcgcggcagcccggtcctttcgtccttcgcacagcggcggatctggtttctccagcaattggacccggagagcaacgcctataatctcccgctcgtgcaacgcctgcgcggtctattggacgcgccggccctggagcgtgcgctggcgctcgtcgtcgcgcgccacgaggcgttgcggacggtgttcgacaccgccgacggcgagcccctccagcgggtgcttcccgccccggaacacctcctgcgccacgcgcgggcgggcagcgaggaggacgccgcccggctcgtccgcgacgagatcgccgcgccgttcgacctcgccaccgggccgttgatcagggccctgctgatccgcctcggtgacgacgaccacgttctcgcggtgaccgtgcaccatgtcgccggcgacggctggtcgttcgggctcctccaacatgaactcgcagcccactacacggcgctgcgcgacactgcccgccctgccgaactgccgccgttgccggtgcagtacgccgacttcgccgcctgggagcggcgcgaactcaccggcgccggactggacaggcgtctggcctactggcgcgagcaactccggggcgccccggcgcggctcgccctccccaccgaccgtccccgcccgccggtcgccgacgcggacgcgggcatggccgagtggcggccgccggccgcgctggccaccgcggtcctcacgctcgcgcgcgactccggtgcgtccgtgttcatgaccctgctggcggccttccaagcggtcctcgcccggcaggcgggcacgcgggacgtgctggtcggcacgcccgtggcgaaccgtacgcgggcggcgtacgagggcctgatcggcatgttcgtcaacacgctcgcgctgcgcggcgacctctcgggcgatccgtcgttccgggaactcctcgaccgctgccgggccacgaccacggacgcgttcgcccacgccgacctgccgttcgagaacgtcatcgaactcgtcgcaccggaacgcgacctgtcggtcaacccggtcgtccaggtgctgttgcaggtgctgcggcgcgacgcggcgacggccgcgctgcccggcatcgcggccgaaccgttccgcaccggacgctggttcacccgcttcgacctcgaattccatgtgtacgaggagccgggtggcgcgctgaccggcgaactgctctacagccgtgcgctgttcgacgagccacggatcacggggttgctggaggagttcacggcggtgcttcaggcggtcaccgccgacccggacgtacggctgtcgcggctgccggccggcgacgcgacggcggcagcgcccgtggtgccctcgaacgacacggcgcgggacctgcccgtcgacacgctgccgggcctgctggcccggtacgccgcacgcacccccggcgccgtggccgtcaccgacccgcacatctccctcacctacgcgcagctggaccggcgggcgaaccgcctcgcgcacctgctccgcgcgcgcggcaccgccaccggcgacctggtcgggatctgcgccgatcgcggcgccgacctgatcgtcggcatcgtggggatcctcaaggcgggcgccgcttatgtgccgctggaccccgaacatcctccggagcgcacggcgttcgtgctggccgacgcgcagctgaccacggtggtggcgcacgaggtctaccgttcccggttccccgatgtgccgcacgtggtggcgttggacgacccggagctggaccggcagccggacgacacggcgccggacgtcgagctggaccgggacagcctcgcctacgcgatctacacgtccgggtcgaccggcaggccgaaggccgtgctcatgccgggtgtcagcgccgtcaacctgctgctctggcaggagcgcacgatgggccgcgagccggccagccgcaccgtccagttcgtgacgcccacgttcgactactcggtgcaggagatcttttccgcgctgctgggcggcacgctcgtcatcccgccggacgaggtgcggttcgacccgccgggactcgcccggtggatggacgaacaggcgattacccggatctacgcgccgacggccgtactgcgcgcgctgatcgagcacgtcgatccgcacagcgaccagctcgccgccctgcggcacctgtgccagggcggcgaggcgctgatcctcgacgcgcggttgcgcgagctgtgccggcaccggccccacctgcgcgtgcacaatcactacggtccggccgaaagccagctcatcaccgggtacacgctgcccgccgaccccgacgcgtggcccgccaccgcaccgatcggcccgccgatcgacaacacccgcatccatctgctcgacgaggcgatgcggccggttccggacggtatgccggggcagctctgcgtcgccggcgtcggcctcgcccgtgggtacctggcccgtcccgagctgaccgccgagcgctgggtgccgggagatgcggtcggcgaggagcgcatgtacctcaccggcgacctggcccgccgcgcgcccgacggcgacctggaattcctcggccggatcgacgaccaggtcaagatccgcggcatccgcgtcgaaccgggtgagatcgagagcctgctcgccgaggacgcccgcgtcacgcaggcggcggtgtccgtgcgcgaggaccggcggggcgagaagttcctggccgcgtacgtcgtaccggtggccggccggcacggcgacgacttcgccgcgtcgctgcgcgcgggactggccgcccggctgcccgccgcgctcgtgccctccgccgtcgtcctggtggagcgactgccgaggaccacgagcggcaaggtggaccggcgcgcgctgcccgacccggagccgggcccggcgtcgaccggggcggttacgccccgcaccgatgccgagcggacggtgtgccggatcttccaggaggtgctcgacgtcccgcgggtcggtgccgacgacgacttcttcacgctcggcgggcactccctgctcgccacccgggtcgtctcccgcatccgcgccgagctgggtgccgatgtcccgctgcgtacgctcttcgacgggcggacgcccgccgcgctcgcccgtgcggcggacgaggccggcccggccgccctgcccccgatcgcgccctccgcggagaacgggccggcccccctcaccgcggcacaggaacagatgctgcactcgcacggctcgctgctcgccgcgccctcctacacggtcgccccgtacgggttccggctgcgcgggccactcgaccgcgaagcgctcgacgcggcactgacccggatcgccgcgcgccacgagccgctgcggaccgggttccgcgatcgggaacaggtcgtccggccgcccgctccggtgcgcgccgaggtggttccggtgccggtcggcgacgtcgacgccgcggtccgggtcgcccaccgggagctgacccggccgttcgacctcgtgaacgggtcgttgctgcgtgccgtgctgctgccgctgggcgccgaggatcacgtgctgctgctgatgctgcaccacctcgccggtgacggatggtccttcgacctcctggtccgggagttgtcggggacgcaaccggaccttccggtgtcctacacggacgtggcccggtgggaacggagtccggccgtgatcgcggccagggagaacgaccgggcctactggcgccggcggctggggggcgccaccgcgccggagctgcccgcggtccggcccggcggggcaccgaccgggcgggcgttcctgtggacgctcaaggacaccgccgtcctggcggcacgccgggtcgcggacgcccacgacgcgacgttgcacgaaaccgtgctcggcgccttcgccctggtcgtggcggagaccgccgacaccgacgacgtgctcgtcgcgacgccgttcgcggaccgggggtacgccgggaccgaccacctcatcggcttcttcgcgaaggtcctcgcgctgcgcctcgacctcggcggcacgccgtcgttccccgaggtgctgcgccgggtgcacaccgcgatggtgggcgcgcacgcccaccaggcggtgccctactccgcgctgcgcgccgaggaccccgcgctgccgccggcccccgtgtcgttccagctcatcagcgcgctcagcgcggaactgcggctgcccggcatgcacaccgagccgttccccgtcgtcgccgagaccgtcgacgagatgaccggcgaactgtcgatcaacctcttcgacgacggtcgcaccgtctccggcgcggtggtccacgatgccgcgctgctcgaccgtgccaccgtcgacgatttgctcacccgggtggaggcgacgctgcgtgccgccgcgggcgacctcaccgtacgcgtcaccggttacgtggaaagcgagtagccatgcccgagcaggacaagacagtcgagtaccttcgctgggcgaccgcggaactccagaagacccgtgcggaactcgccgcgcacagcgagccgttggcgatcgtggggatggcctgccggctgcccggcggggtcgcgtcgccggaggacctgtggcagttgctggagtccggtggcgacggcatcaccgcgttccccacggaccggggctgggagaccaccgccgacggtcgcggcggcttcctcaccggggcggccggcttcgacgcggcgttcttcggcatcagcccgcgcgaggcgctggcgatggacccgcagcagcgcctggccctggagacctcgtgggaggcgttcgagcacgcgggcatcgatccgcagacgctgcggggcagtgacacgggggtgttcctcggcgcgttcttccaggggtacggcatcggcgccgacttcgacggttacggcaccacgagcattcacacgagcgtgctctccggccgcctcgcgtacttctacggtctggagggtccggcggtcacggtcgacacggcgtgttcgtcgtcgctggtggcgctgcaccaggccgggcagtcgctgcgctccggcgaatgctcgctcgccctggtcggcggcgtcacggtgatggcctcgccggcggggttcgcggacttctccgagcagggcggcctggcccccgacgcgcgctgcaaggccttcgcggaagcggctgacggcaccggtttcgccgaggggtccggcgtcctgatcgtcgagaagctctccgacgccgagcgcaacggccaccgcgtgctggcggtcgtccggggttccgccgtcaaccaggacggtgcctccaacgggctgtccgcgccgaacgggccgtcgcaggagcgggtgatccggcaggccctggccaacgccggactcaccccggcggacgtggacgccgtcgaggcccacggcaccggcaccaggctgggcgaccccatcgaggcacaggccgtgctggccacctacgggcaggggcgcgacacccctgtgctgctgggctcgctgaagtccaacatcggccacacccaggccgccgcgggcgtcgccggtgtcatcaagatggtcctcgccatgcggcacggcaccctgccccgcaccctgcacgtggacacgccgtcctcgcacgtcgactggacggccggcgccgtcgaactcctcaccgacgcccggccctggcccgaaaccgaccgcccacggcgcgccggtgtctcctccttcggcgtcagcggcaccaacgcccacatcatcctcgaaagccacccccgaccggcccccgaacccgccccggcacccgacaccggaccgctgccgctgctgctctcggcccgcaccccgcaggcactcgacgcacaggtacaccgcctgcgcgcgttcctcgacgacaaccccggcgcggaccgggtcgccgtcgcgcagacactcgcccggcgcacccagttcgagcaccgcgccgtgctgctcggcgacacgctcatcaccgtgagcccgaacgccggccgcggaccggtggtcttcgtctactcggggcaaagcacgctgcacccgcacaccgggcggcaactcgcgtccacctaccccgtgttcgccgaagcgtggcgcgaggccctcgaccacctcgaccccacccagggcccggccacgcacttcgcccaccagaccgcgctcaccgcgctcctgcggtcctggggcatcaccccgcacgcggtcatcggccactccctcggtgagatcaccgccgcgcacgccgccggtgtcctgtccctgagggacgcgggcgcgctcctcaccacccgcacccgcctgatggaccaactgccgtcgggcggcgcgatggtcaccgtcctgaccagcgaggaaaaggcacgccaggtgctgcggccgggcgtggagatcgccgccgtcaacggcccccactccctcgtgctgtccggggacgaggaagccgtactcgaagccgcccggcagctcggcatccaccaccgcctgccgacccgccacgccggccactccgagcgcatgcagccactcgtcgcccccctcctcgacgtcgcccggaccctgacgtaccaccagccccacaccgccatccccggcgaccccaccaccgccgaatactgggcgcaccaggtccgcgaccaagtacgtttccaggcgcacaccgagcagtacccgggcgcgacgttcctcgagatcggccccaaccaggacctctcgccgctcgtcgacggcgttgccgcccagaccggtacgcccgacgaggtgcgggcgctgcacaccgcgctcgcgcagctccacgtccgcggcgtcgcgatcgactggacgctcgtcctcggcggggaccgcgcgcccgtcacgctgcccacgtatccgttccagcacaaggactactggctgcggcccacctcccgggccgatgtgaccggcgcggggcaggagcaggtggcgcacccgctgctcggcgccgcggtcgcgctgcccggcacgggcggagtcgtcctgaccggccgcctgtcgctggcctcccatccgtggctcggcgagcacgcggtcgacggcaccgtgctcctgcccggcgcggccttcctcgaactcgcggcgcgcgccggcgacgaggtcggctgcgacctgctgcacgaactcgtcatcgagacgccgctcgtgctgcccgcgaccggcggtgtggcggtctccgtcgagatcgccgaacccgacgacacggggcggcgggcggtcaccgtccacgcgcgggccgacggctcgggcctgtggacccgacacgccggcggattcctcggcacggcaccggcaccggccacggccacggacccggcaccctggccgcccgcggaagccggaccggtcgacgtcgccgacgtctacgaccggttcgaggacatcgggtactcctacggaccgggcttccgggggctgcgggccgcctggcgcgccggcgacaccgtgtacgccgaggtcgcgctccccgacgagcagagcgccgacgccgcccgtttcacgctgcaccccgcgctgctcgacgccgcgttccaggccggcgcgctggccgcgctcgacgcacccggcggggcggcccgactgccgttctcgttccaggacgtccgcatccacgcggccggggcgacgcggctgcgggtcacggtcggccgcgacggcgagcgcagcaccgtccgcatgaccggcccggacgggcagctggtggccgtggtcggtgccgtgctgtcgcgcccgtacgcggaaggctccggtgacggcctgctgcgcccggtctggaccgagctgccgatgcccgtcccgtccgcggacgatccgcgcgtggaggtcctcggcgccgacccgggcgacggcgacgttccggcggccacccgggagctgaccgcccgcgtcctcggcgcgctccagcgccacctgtccgccgccgaggacaccaccttggtggtacggaccggcaccggcccggccgctgccgccgccgcgggtctggtccgctcggcgcaggcggagaaccccggccgcgtcgtgctcgtcgaggcgtccccggacacctcggtggagctgctcgccgcgtgcgccgcgctggacgaaccgcagctggccgtccgggacggcgtgctcttcgcgccgcggctggtccggatgtccgaccccgcgcacggcccgctgtccctgccggacggcgactggctgctcacccggtccgcctccggcacgttgcacgacgtcgcgctcatagccgacgacacgccccggcgggcgctcgaagccggcgaggtccgcatcgacgtccgcgcggccggactgaacttccgcgatgtgctgatcgcgctcgggacgtacaccggggccacggccatgggcggcgaggccgcgggcgtcgtggtggagaccgggcccggcgtggacgacctgtcccccggcgaccgggtgttcggcctgacccggggcggcatcggcccgacggccgtcaccgaccggcgctggctggcccggatccccgacggctggagcttcaccacggcggcgtccgtcccgatcgtgttcgcgaccgcgtggtacggcctggtcgacctcggcacactgcgcgccggcgagaaggtcctcgtccacgcggccaccggcggtgtcggcatggccgccgcacagatcgcccgccacctgggcgccgagctctacgccaccgccagtaccggcaagcagcacgtcctgcgcgccgccgggctgcccgacacgcacatcgccgactctcggacgaccgcgttccggaccgctttcccgcgcatggacgtcgtcctgaacgcgctgaccggcgagttcatcgacgcgtcgctcgacctgctggacgccgacggccggttcgtcgagatgggccgcaccgagctgcgcgacccggccgcgatcgtccccgcctacctgccgttcgacctgctggacgcgggcgccgaccgcatcggcgagatcctgggcgaactgctccggctgttcgacgcgggcgcgctggagccgctgccggtccgtgcctgggacgtccggcaggcacgcgacgcgctcggctggatgagccgcgcccgccacatcggcaagaacgtcctgacgctgccccggccgctcgacccggagggcgccgtcgtcctcaccggcggctccggcacgctcgccggcatcctcgcccgccacctgcgcgaacggcatgtctacctgctgtcccggacggcaccgcccgaggggacgcccggcgtccacctgccctgcgacgtcggtgaccgggaccagctggcggcggccctggagcgggtggaccggccgatcaccgccgtggtgcacctcgccggtgcgctggacgacggcaccgtcgcgtcgctcacccccgagcgtttcgacacggtgctgcgcccgaaggccgacggcgcctggtacctgcacgagctgacgaaggagcaggacctcgccgcgttcgtgctctactcgtcggccgccggcgtgctcggcaacgccggccagggcaactacgtcgccgcgaacgcgttcctcgacgcgctcgccgagctgcgccacggttccgggctgccggccctctccatcgcctgggggctctgggaggacgtgagcgggctcaccgcggcgctcggcgaagccgaccgggaccggatgcggcgcagcggtttccgggccatcaccgcgcaacagggcatgcacctgtacgaggcggccggccgcaccggaagtcccgtggtggtcgcggcggcgctcgacgacgcgccggacgtgccgctgctgcgcggcctgcggcggacgaccgtccggcgggccgccgtccgggagtgttcgtccgccgaccggctcgccgcgctgaccggcgacgagctcgccgaagcgctgctgacgctcgtccgggagagcaccgccgccgtgctcggccacgtgggtggcgaggacatccccgcgacggcggcgttcaaggacctcggcatcgactcgctcaccgcggtccagctgcgcaacgccctcaccgaggcgaccggtgtgcggctgaacgccacggcggtcttcgacttcccgaccccgcacgtgctcgccgggaagctcggcgacgaactgaccggcacccgcgcgcccgtcgtgccccggaccgcggccacggccggtgcgcacgacgagccgctggcgatcgtgggaatggcctgccggctgcccggcggggtcgcgtcacccgaggagctgtggcacctcgtggcatccggcaccgacgccatcacggagttcccgacggaccgcggctgggacgtcgacgcgatctacgacccggaccccgacgcgatcggcaagaccttcgtccggcacggtggcttcctcaccggcgcgacaggcttcgacgcggcgttcttcggcatcagcccgcgcgaggccctcgcgatggacccgcagcagcgggtgctcctggagacgtcgtgggaggcgttcgaaagcgccggcatcaccccggactcgacccgcggcagcgacaccggcgtgttcgtcggcgccttctcctacggttacggcaccggtgcggacaccgacggcttcggcgcgaccggctcgcagaccagtgtgctctccggccggctgtcgtacttctacggtctggagggtccggcggtcacggtcgacacggcgtgttcgtcgtcgctggtggcgctgcaccaggccgggcagtcgctgcgctccggcgaatgctcgctcgccctggtcggcggcgtcacggtgatggcgtctcccggcggcttcgtggagttctcccggcagcgcggcctcgcgccggacggccgggcgaaggcgttcggcgcgggtgcggacggcacgagcttcgccgagggtgccggtgtgctgatcgtcgagaggctctccgacgccgaacgcaacggtcacaccgtcctggcggtcgtccgtggttcggcggtcaaccaggatggtgcctccaacgggctgtcggcgccgaacgggccgtcgcaggagcgggtgatccggcaggccctggccaacgccgggctcaccccggcggacgtggacgccgtcgaggcccacggcaccggcaccaggctgggcgaccccatcgaggcacaggcggtactggccacctacggacaggagcgcgccacccccctgctgctgggctcgctgaagtccaacatcggccacgcccaggccgcgtccggcgtcgccggcatcatcaagatggtgcaggccctccggcacggggagctgccgccgacgctgcacgccgacgagccgtcgccgcacgtcgactggacggccggcgccgtcgaactgctgacgtcggcccggccgtggcccgagaccgaccggccacggcgtgccgccgtctcctcgttcggggtgagcggcaccaacgcccacgtcatcctggaggccggaccggtaacggagacgcccgcggcatcgccttccggtgaccttcccctgctggtgtcggcacgctcaccggaagcgctcgacgagcagatccgccgactgcgcgcctacctggacaccaccccggacgtcgaccgggtggccgtggcacagacgctggcccggcgcacacacttcgcccaccgcgccgtgctgctcggtgacaccgtcatcaccacaccccccgcggaccggcccgacgaactcgtcttcgtctactccggccagggcacccagcatcccgcgatgggcgagcagctcgccgccgcccatcccgtgttcgccgacgcctggcatgaagcgctccgccgccttgacaaccccgacccccacgaccccacgcacagccagcatgtgctcttcgcccaccaggcggcgttcaccgccctcctgcggtcctggggcatcaccccgcacgcggtcatcggccactcgctgggcgagatcaccgcggcgcacgccgccggcatcctgtcgctggacgacgcgtgcaccctgatcaccacgcgcgcccgcctcatgcacacgctcccgccacccggtgccatggtcaccgtactgaccagcgaagagaaggcacgccaggcgttgcggccgggcgtggagatcgccgccgtcaacgggccccactccatcgtgctgtccggggacgaggacgccgtgctcaccgtcgccgggcagctcggcatccaccaccgcctgcccgccccgcacgccgggcactccgcgcacatggagcccgtggccgccgagctgctcgccaccacccgcgggctccgctaccaccctccccacacctccattccgaacgaccccaccaccgctgagtactgggccgagcaggtccgcaagcccgtgctgttccacgcccacgcgcagcagtacccggacgccgtgttcgtggagatcggccccgcccaggacctctccccgctcgtcgacgggatcccgctgcagaacggcaccgcggacgaggtgcacgcgctgcacaccgcgctcgcgcacctctacgcgcgcggtgccacgctcgactggccccgcatcctcggggctgggtcacggcacgacgcggatgtgcccgcgtacgcgttccaacggcggcactactggatcgagtcggcacgcccggccgcatccgacgcgggccaccccgtgctgggctccggtatcgccctcgccgggtcgccgggccgggtgttcacgggttccgtgccgaccggtgcggaccgcgcggtgttcgtcgccgagctggcgctggccgccgcggacgcggtcgactgcgccacggtcgagcggctcgacatcgcctccgtgcccggccggccgggccatggccggacgaccgtacagacctgggtcgacgagccggcggacgacggccggcgccggttcaccgtgcacacccgcaccggcgacgccccgtggacgctgcacgccgagggggtgctgcgcccccatggcacggccctgcccgatgcggccgacgccgagtggcccccaccgggcgcggtgcccgcggacgggctgccgggtgtgtggcgccggggggaccaggtcttcgccgaggccgaggtggacggaccggacggtttcgtggtgcaccccgacctgctcgacgcggtcttctccgcggtcggcgacggaagccgccagccggccggatggcgcgacctgacggtgcacgcgtcggacgccaccgtactgcgcgcctgcctcacccggcgcaccgacggagccatgggattcgccgccttcgacggcgccggcctgccggtactcaccgcggaggcggtgacgctgcgggaggtggcgtcaccgtccggctccgaggagtcggacggcctgcaccggttggagtggctcgcggtcgccgaggcggtctacgacggtgacctgcccgagggacatgtcctgatcaccgccgcccaccccgacgaccccgaggacatacccacccgcgcccacacccgcgccacccgcgtcctgaccgccctgcaacaccacctcaccaccaccgaccacaccctcatcgtccacaccaccaccgaccccgccggcgccaccgtcaccggcctcacccgcaccgcccagaacgaacacccccaccgcatccgcctcatcgaaaccgaccacccccacacccccctccccctggcccaactcgccaccctcgaccacccccacctccgcctcacccaccacaccctccaccacccccacctcacccccctccacaccaccaccccacccaccaccacccccctcaaccccgaacacgccatcatcatcaccggcggctccggcaccctcgccggcatcctcgcccgccacctgaaccacccccacacctacctcctctcccgcaccccaccccccgacgccacccccggcacccacctcccctgcgacgtcggcgacccccaccaactcgccaccaccctcacccacatcccccaacccctcaccgccatcttccacaccgccgccaccctcgacgacggcatcctccacgccctcacccccgaccgcctcaccaccgtcctccaccccaaagccaacgccgcctggcacctgcaccacctcacccaaaaccaacccctcacccacttcgtcctctactccagcgccgccgccgtcctcggcagccccggacaaggaaactacgccgccgccaacgccttcctcgacgccctcgccacccaccgccacaccctcggccaacccgccacctccatcgcctggggcatgtggcacaccaccagcaccctcaccggacaactcgacgacgccgaccgggaccgcatccgccgcggcggtttcctcccgatcacggacgacgagggcatgcgcctctacgaggcggccgtcggctccggcgaggacttcgtcatggccgccgcgatggacccggcacagccgatgaccggctccgtaccgcccatcctgagcggcctgcgcaggagcgcgcggcgcgtcgcccgtgccgggcagacgttcgcccagcggctcgccgagctgcccgacgccgaccgcggcgcggcgctgaccaccctcgtctcggacgccacggccgccgtgctcggccacgccgacgcctccgagatcgcgccgaccacgacgttcaaggacctcggcatcgactcgctcaccgcgatcgagctgcgcaaccggctcgcggaggcgaccgggctgcggctgagtgccacgctggtgttcgaccacccgacacctcgggtcctcgccgccaagctccgcaccgatctgttcggcacggccgtgcccacgcccgcgcggacggcacggacccaccacgacgagccactcgcgatcgtcggcatggcgtgccgactgcccggcggggtcgcctcgccggaggacctgtggcagctcgtggcgtccggcaccgacgcgatcaccgagttccccaccgaccgcggctgggacatcgaccggctgttcgacccggacccggacgcccccggcaagacctacgtccggcacggcggcttcctcgccgaggccgccggcttcgatgccgcgttcttcggcatcagcccgcgcgaggcacgggccatggacccgcagcagcgcgtcatcctcgaaacctcctgggaggcgttcgagaacgcgggcatcgtgccggacacgctgcgcggcagcgacaccggcgtgttcatgggcgcgttctcccatgggtacggcgccggcgtcgacctgggcgggttcggcgccaccgccacgcagaacagcgtgctctccggccggttgtcgtacttcttcggcatggagggcccggccgtcaccgtcgacaccgcctgctcgtcgtcgctggtcgccctgcaccaggcggcacaggcgctgcggactggagaatgctcgctggcgctcgccggcggtgtcacggtgatgcccaccccgctgggctacgtcgagttctgccgccagcggggactcgcccccgacggccgttgccaggccttcgcggaaggcgccgacggcacgagcttctcggagggcgccggcgttcttgtgctggagcggctctccgacgccgagcgcaacggacacaccgtcctcgcggtcgtccgctcctccgccgtcaaccaggacggcgcctccaacggcatctccgcacccaacggcccctcccagcagcgcgtcatccgccaggccctcgacaaggccgggctcgcccccgccgacgtggacgtggtggaggcccacggcaccggaaccccgctgggcgacccgatcgaggcacaggccatcatcgcgacctacggccaggaccgcgacacaccgctctacctcggttcggtcaagtcgaacatcggacacacccagaccaccgccggtgtcgccggcgtcatcaagatggtcatggcgatgcgccacggcatcgcgccgaagacactgcacgtggacgagccgtcgtcgcatgtggactggaccgagggtgcggtggaactgctcaccgaggcgaggccgtggcccgacgcgggacgcccgcgccgcgcgggcgtgtcgtcgctcggtatcagcggtacgaacgcccacgtgatccttgagggtgttcccgggccgtcgcgtgtggagccgtctgttgacgggttggtgccgttgccggtgtcggctcggagtgaggcgagtctgcgggggcaggtggagcggctggaggggtatctgcgcgggagtgtggatgtggccgcggtcgcgcaggggttggtgcgtgagcgtgctgtcttcggtcaccgtgcggtactgctgggtgatgcccgggtgatgggtgtggcggtggatcagccgcgtacggtgttcgtctttcccgggcagggtgctcagtgggtgggcatgggtgtggagttgatggaccgttctgcggtgttcgcggctcgtatggaggagtgtgcgcgggcgttgttgccgcacacgggctgggatgtgcgggagatgttggcgcggccggatgtggcggagcgggtggaggtggtccagccggccagctgggcggtcgcggtcagcctggccgcactgtggcaggcccacggggtcgtacccgacgcggtgatcggacactcccagggcgagatcgcggcggcgtgcgtggccggggccctcagccttgaggacgccgcccgcgtggtggccttgcgcagccaggtcatcgcggcgcgactggccgggcggggagcgatggcttcggtggcattgccggccggtgaggtcggtctggtcgagggcgtgtggatcgcggcgcgtaacggccccgcctcgacagtcgtggccggcgagccgtcggcggtggaggacgtggtgacgcggtatgagaccgaaggcgtgcgagtgcgtcgtatcgccgtcgactacgcctcccacacgccccacgtggaagccatcgaggacgaactcgctgaggtactgaagggagttgcagggaaggccgcgtcggtggcgtggtggtcgaccgtggacagcgcctgggtgaccgagccggtggatgagagttactggtaccggaacctgcgtcgccccgtcgcgctggacgcggcggtggcggagctggacgggtccgtgttcgtggagtgcagcgcccatccggtgctgctgccggcgatggaacaggcccacacggtggcgtcgttgcgcaccggtgacggcggctgggagcgatggctgacggcgttggcgcaggcgtggaccctgggcgcggcagtggactgggacacggtggtcgaaccggtgccagggcggctgctcgatctgcccacctacgcgttcgagcgccggcgctactggctggaagcggccggtgccaccgacctgtccgcggccgggctgacaggggcagcacatcccatgctggccgccatcacggcactacccgccgacgacggtggtgttgttctcaccggccggatctcgttgcgcacgcatccctggctggctgatcacgcggtgcggggcacggtcctgctgccgggcacggcctttgtggagctggtcatccgggccggtgacgagaccggttgcgggatagtggatgaactggtcatcgaatcccccctcgtggtgccggcgaccgcagccgtggatctgtcggtgaccgtggaaggagctgacgaggccggacggcggcgagtgaccgtccacgcccgcaccgaaggcaccggcagctggacccggcacgccagcggcaccctgacccccgacacccccgacacccccaacgcttccggtgttgtcggtgcggagccgttctcgcagtggccacctgccactgccgcggccgtcgacacctcggagttctacttgcgcctggacgcgctgggctaccggttcggacccatgttccgcggaatgcgggctgcctggcgtgatggtgacaccgtgtacgccgaggtcgcgctccccgaggaccgtgccgccgacgcggacggtttcggcatgcacccggcgctgctcgacgcggccttgcagagcggcagcctgctcatgctggaatcggacggcgagcagagcgtgcaactgccgttctcctggcacggcgtccggttccacgcgacgggcgcgaccatgctgcgggtggcggtcgtaccgggcccggacggcctccggctgcatgccgcggacagcgggaaccgtcccgtcgcgacgatcgacgcgctcgtgacccggtccccggaagcggacctcgcgcccgccgatccgatgctgcgggtcgggtgggccccggtgcccgtacctgccggggccggtccgtccgacgcggacgtgctgacgctgcgcggcgacgacgccgacccgctcggggagacccgggacctgaccacccgtgttctcgacgcgctgctccgggccgaccggccggtgatcttccaggtgaccggtggcctcgccgccaaggcggccgcaggcctggtccgcaccgctcagaacgagcagcccggccgcttcttcctcgtcgaaacggacccgggagaggtcctggacggcgcgaagcgcgacgcgatcgcggcactcggcgagccccatgtgcggctgcgcgacggcctcttcgaggcagcccggctgatgcgggccacgccgtccctgacgctcccggacaccgggtcgtggcagctgcggccgtccgccaccggttccctcgacgaccttgccgtcgtccccaccgacgccccggaccggccgctcgcggccggcgaggtgcggatcgcggtacgcgcggcgggcctgaacttccgggatgtcacggtcgcgctcggtgtggtcgccgatgcgcgtccgctcggcagcgaggccgcgggtgtcgtcctggagaccggccccggtgtgcacgacctggcgcccggcgaccgggtcctggggatgctcgcgggcgccttcggaccggtcgcgatcaccgaccggcggctgctcggccggatgccggacggctggacgttcccgcaggcggcgtccgtgatgaccgcgttcgcgaccgcgtggtacggcctggtcgacctggccgggctgcgccccggcgagaaggtcctgatccacgcggcggcgaccggtgtcggcgcggcggccgtccagatcgcgcggcatctgggcgcggaggtgtacgcgaccaccagcgccgcgaagcgccatctggtggacctggacggagcgcatctggccgattcccgcagcaccgcgttcgccgacgcgttcccgccggtcgatgtcgtgctcaactcgctcaccggtgaattcctcgacgcgtccgtcggcctgctcgcggcgggtggccggttcatcgagatggggaagacggacatccggcacgccgtccagcagccgttcgacctgatggacgccggccccgaccggatgcagcggatcatcgtcgagctgctcggcctgttcgcgcgcgacgtgctgcacccgctgccggtccacgcctgggacgtgcggcaggcgcgggaggcgttcggctggatgagcagcgggcgtcacaccggcaagctggtgctgacggtcccgcggccgctggatcccgagggggccgtcgtcatcaccggcggctccggcaccctcgccggcatcctcgcccgccacctgggccacccccacacctacctgctctcccgcaccccaccccccgacaccacccccggcacccacctcccctgcgacgtcggcgacccccaccaactcgccaccaccctcgcccgcatcccccaacccctcaccgccgtcttccacaccgccggaaccctcgacgacgccctgctcgacaacctcacccccgaccgcgtcgacaccgtcctcaaacccaaggccgacgccgcctggcacctgcaccggctcacccgcgacaccgacctcgccgcgttcgtcgtctactccgcggtcgccggcctcatgggcagcccggggcagggcaactacgtcgcggcgaacgcgttcctcgacgcgctcgccgaacaccgccgtgcgcaagggctgcccgcgcagtccctcgcatggggcatgtgggcggacgtcagcgcgctcaccgcgaaactcaccgacgcggaccgccagcgcatccggcgcagcggattcccgccgttgagcgccgcggacggcatgcggctgttcgacgcggcgacgcgtaccccggaaccggtcgtcgtcgcgacgaccgtcgacctcacccagctcgacggcgccgtcgcgccgttgctccgcggtctggccgcgcaccgggccgggccggcgcgcacggtcgcccgcaacgccggcgaagagcccctggccgtgcgtcttgccgggcgtaccgccgccgagcagcggcgcatcatgcaggaggtcgtgctccgccacgcggccgcggtcctcgcgtacgggctgggcgaccgcgtggcggcggaccgtccgttccgcgagctcggtttcgattcgctgaccgcggtcgacctgcgcaatcggctcgcggccgagacggggctgcggctgccgacgacgctggtgttcagccacccgacggcggaggcgctcaccgcccacctgctcgacctgatcgacgctcccaccgcccggatcgccggggagtccctgcccgcggtgacggccgctcccgtggcggccgcgcgggaccaggacgagccgatcgccatcgtggcgatggcgtgccggctgcccggtggtgtgacgtcgcccgaggacctgtggcggctcgtcgagtccggcaccgacgcgatcaccacgcctcctgacgaccgcggctgggacgtcgacgcgctgtacgacgcggacccggacgcggccggcaaggcgtacaacctgcggggcggttacctggccggggcggcggagttcgacgcggcgttcttcgacatcagtccgcgcgaagcgctcggcatggacccgcagcaacgcctgctgctcgaaacggcgtgggaggcgatcgagcgcggccggatcagtccggcgtcgctccgcggccgggaggtcggcgtctatgtcggtgcggccgcgcagggctacgggctgggcgccgaggacaccgagggccacgcgatcaccggtggttccacgagcctgctgtccggacggctggcgtacgtgctcgggctggagggcccggcggtcaccgtggacacggcgtgctcgtcgtctctggtcgcgctgcatctggcgtgccaggggctgcgcctgggcgagtgcgaactcgctctggccggaggggtctccgtactgagttcgccggccgcgttcgtggagttctcccgccagcgcgggctcgcggccgacgggcgctgcaagtcgttcggcgcgggcgcggacggcacgacgtggtccgagggcgtgggcgtgctcgtactggaacggctctccgacgccgagcggctcgggcacaccgtgctcgccgtcgtccgcggcagcgccgtcacgtccgacggcgcctccaacggcctcaccgcgccgaacgggctctcgcagcagcgggtcatccggaaggcgctcgccgcggccgggctgaccggcgccgacgtggacgtcgtcgaggggcacggcaccggcacccggctcggcgacccggtcgaggcggacgcgctgctcgcgacgtacgggcaggaccgtccggcaccggtctggctgggctcgctgaagtcgaacatcggacatgccacggccgcggccggtgtcgcgggcgtcatcaagatggtgcaggcgatcggcgcgggcacgatgccgcggacgctgcatgtggaggagccctcgcccgccgtcgactggagcaccggacaggtgtccctgctcggctccaaccggccctggccggacgacgagcgtccgcgccgggcggccgtctccgcgttcgggctcagcgggacgaacgcgcacgtcatcctggaacagcaccgtccggcgcccgtggcgtcccagccgccccggccgccccgtgaggagtcccagccgctgccgtgggtgctctccgcgcggactccggccgcgctgcgggcccaggcggcccggctgcgcgaccacctcgcggcggcaccggacgcggatccgttggacatcgggtacgcgctggccaccagccgcgcccagttcgcccaccgtgccgcggtcgtcgccaccaccccggacggattccgtgccgcgctcgacggcctcgcggacggcgcggaggcgcccggagtcgtcaccgggaccgctcaggagcggcgcgtcgccttcctcttcgacggccagggcgcccagcgcgccggaatggggcgcgagctccaccgccggttccccgtcttcgccgccgcgtgggacgaggtctccgacgcgttcggcaagcacctcaagcactcccccacggacgtctaccacggcgaacacggcgctctcgcccatgacaccctgtacgcccaggccggcctgttcacgctcgaagtggcgctgctgcggctgctggagcactggggggtgcggccggacgtgctcgtcgggcactccgtcggcgaggtgaccgcggcgtacgcggcgggggtgctcaccctggcggacgcgacggagttgatcgtggcccgggggcgggcgctgcgggcgctgccgcccggggcgatgctcgccgtcgacggaagcccggcggaggtcggcgcccgcacggatctggacatcgccgcggtcaacggcccgtccgccgtggtgctcgccggttcgccggacgatgtggcggcgttcgaacgggagtggtcggcggccgggcggcgcacgaaacggctcgacgtcgggcacgcgttccactcccggcacgtcgacggtgcgctcgacggcttccgtacggtgctggagtcgctcgcgttcggcgcggcgcggctgccggtggtgtccacgacgacgggccgggacgccgcggacgacctcataacgcccgcgcactggctgcgccatgcgcgtcggccggtgctgttctcggatgccgtccgggagctggccgaccgcggcgtcaccacgttcgtggccgtcggcccctccggctccctggcgtcggccgcggcggagagcgccggggaggacgccgggacctaccacgcggtgctgcgcgcccggaccggtgaggagaccgcggcgctgaccgccctcgccgagctgcacgcccacggcgtcccggtcgacctggccgcggtactggccggtggccggccagtggaccttcccgtgtacgcgttccagcaccgttcctactggctggccccggccgtggcgggggcgccggccaccgtggcggacaccgggggtccggcggagtccgagccggaggacctcaccgtcgccgagatcgtccgtcggcgcaccgcggcgctgctcggcgtcacggaccccgccgacgtcgatgcggaagcgacgttcttcgcgctcggtttcgactcactggcggtgcagcggctgcgcaaccagctcgcctcggcaaccgggctggacctgccggcggccgtcctgttcgaccacgacaccccggccgcgctcaccgcgttcctccaggaccggatcgaggccggccaggaccggatcgaggccggcgaggacgacgacgcgcccaccgtgctctcgctcctggaggagatggagtcgctcgacgccgcggacatcgcggcgacgccggccccggagcgtgcggccatcgccgatctgctcgacaagctcgcccatacctggaaggactaccgatgagcaccgatacgcacgagggaacgccgcccgccggccgctgcccattcgcgatccaggacggtcaccgcgccatcctggagagcggcacggtgggttcgttcgacctgttcggcgtcaagcactggctggtcgccgccgccgaggacgtcaagctggtcaccaacgatccgcggttcagctcggccgcgccgtccgagatgctgcccgaccggcggcccggctggttctccgggatggactcaccggagcacaaccgctaccggcagaagatcgcgggggacttcacactgcgcgcggcgcgcaagcgggaggacttcgtcgccgaggccgccgacgcctgcctggacgacatcgaggccgcgggacccggcaccgacctcatccccgggtacgccaagcggctgccctccctcgtcatcaacgcgctgtacgggctcacccctgaggagggggccgtgctggaggcacggatgcgcgacatcaccggctcggccgatctggacagcgtcaagacgctgaccgacgacttcttcgggcacgcgctgcggctggtccgcgcgaagcgtgacgagcggggcgaggacctgctgcaccggctggcctcggccgacgacggcgagatctcgctcagcgacgacgaggcgacgggcgtgttcgcgacgctgctgttcgccggccacgactcggtgcagcagatggtcggctactgcctctacgcactgctcagccaccccgagcagcaggcggcgctgcgcgcgcgcccggagctggtcgacaacgcggtcgaggagatgctccgtttcctgcccgtcaaccagatgggcgtaccgcgcgtctgtgtcgaggacgtcgatgtgcggggcgtgcgcatccgtgcgggcgacaacgtgatcccgctctactcgacggccaaccgcgaccccgaggtgttcccgcagcccgacaccttcgatgtgacgcgcccgctggagggcaacttcgcgttcggccacggcattcacaagtgtcccggccagcacatcgcccgggtgctcatcaaggtcgcctgcctgcggttgttcgagcgtttcccggacgtccggctggccggcgacgtgccgatgaacgaggggctcgggctgttcagcccggccgagctgcgggtcacctggggggcggcatgagtcacccggtggagacgttgcggttgccgaacgggacgacggtcgcgcacatcaacgcgggcgaggcgcagttcctctaccgggagatcttcacccagcgctgctacctgcgccacggtgtcgacctgcgcccgggggacgtggtgttcgacgtcggcgcgaacatcggcatgttcacgcttttcgcgcatctggagtgtcctggtgtgaccgtgcacgccttcgagcccgcgcccgtgccgttcgcggcgctgcgggcgaacgtgacgcggcacggcatcccgggccaggcggaccagtgcgcggtctccgacagctccggcacccggaagatgaccttctatcccgacgccacgctgatgtccggtttccacgcggatgccgcggcccggacggagctgttgcgcacgctcggcctcaacggcggctacaccgccgaggacgtcgacaccatgctcgcgcaactgcccgacgtcagcgaggagatcgaaacccctgtggtccggctctccgacgtcatcgcggagcgcggtatcgaggccatcggcctgctgaaggtcgacgtggagaagagcgaacggcaggtcttcgccggcctcgaggacaccgactggccccgtatccgccaggtcgtcgcggaggtccacgacatcgacggcgcgctcgaggaggtcgtcacgctgctccgcggccatggcttcaccgtggtcgccgagcaggaaccgctgttcgccggcacgggcatccaccaggtcgccgcgcggcgggtggccggctgagcgccgtcggggccgcggccgtccgcaccggcggccgcggtgcggacggcggctcagccggcgtcggacagttccttgggcagttgctgacggcccttcacccccagcttgcggaacacgttggtgaggtgctgttccaccgtgctggaggtgacgaacagctggctggcgatctccttgttggtgcgcccgaccgcggcgtgcgacgccacccgccgctccgcctcggtcagcgatgtgatccgctgcgccggcgtcacgtcctgggtgccgtccgcgtccgaggactccccaccgagccgccggaggagcggcacggctccgcactgggtcgcgaggtgccgtgcgcggcggaacagtccccgcgcacggctgtgccgccggagcatgccgcacgcttcgcccatgtcggcgaggacgcgggccagctcgtactggtcgcggcacatgatgagcagatcggcggcctcgtcgagcagttcgatccgcttggccggcggactgtaggccgcctgcacccgcagcgtcatcacccgcgcccgggaccccatcggccgggacagctgctcggagatgagcctcagcccctcgtcacggccgcggccgagcagcagaagcgcttcggcggcgtcgacccgccacagggccaggcccggcacgtcgacggaccagcgtcgcatccgctccccgcagtcccggaacgcgttgtacgccgcccggtaccgcccggccgcgagatggtgttgcccacgggcccagaccatgtgcagtccgaagaggctgtcggaggtctcctccggcaacggctcggcgagccaccgctccgcccggtccaggtcgcccagtcggatcgcggcggccacggtgctgctcagcggcaatgcggcggccatcccccaggagggcacgacccggggggcgagcgcggcctcgccgcattcgacggcggcggtcaggtcgccgcggcgcagcgcggcctcggcgcggaaccccgcgtggaccgcctcgtcggccggggtccgcatgttgtcgtcaccggccagcttgtcgacccaggactggacggcatcggtgtcctcggcgtagagcagggccagcaacgccatcatggtcgtggtccggtccgtcgtgacccgggagtgctggagcacgtactcggctttggcctcggcctgttcggaccagccgcgcagcgcgttgctcagggccttgtcggcgacggcgcggtgccggacggctccggaaaacgaggcgacctcgtcctcggccggcggatcggccggacgcggcggatcggccgcgccgggatagatcagcgcgagggacaggtccgcgacgcgcaggtgcgcccggccctgctcgctcggggcggcggagcgctgggccgccaggacctcggcggcctcgcccggccgcccgtccatcgccagccagcaggcgagcgacacggcgtgctcgctggagaggagccgttcccgcgacgcggtgagcagctcgggcacatgccggccggatctggcgggatcgcagagccgctcgatggcggcggtgtcgacgcgcagtgcggcgtggacggcggggtcgtcggaggcccggtaggcgaactccaggtaggtgacggcctcgtcgagctcgccgcgcaggtggtgctcgcgcgcggcgtcggtgaacagcccggcgacctcggcgccgtgcacccggccggtacccatctggtggcgggcgagcaccttgctggccacgccgcggtcccgcagcagttccagcgccagctcgtgcaggccacgccgctcggcggcggagaggtcgtcgagtacgacggagcgggccgcggggtgcgggaaccgcccttcccgcagcagccgcccctcgaccagctgttcgtgggcctgctcgaccgcctcggtgtcgaggccggtcatccgctggacgagggtgagttcgacactctcgccgagcacggcggaagctcgggcgacgctcagcgcggccgggccgcaacgatagagcgacccgaggtaggcgagccggtacgcccgccccgcgaccacttccaggcaccctgaggtccgtgtccgtgcctcccggatgtcgtcgatcaggccgtggccgaggagcaggttgccgccggtcgcccggaacgcctgggccaccacgtcgtcgtgcgcgtcctggccgaggtgccggcgcacgagttcggtggtctgcgcctcggtgagcgggcgcagcgcgatctcctggtagtggcgcagactcagcagtgccgcccggaattgggagtgggcgggcgtcggccggagcagctcggtcagcacgatggcgacacgggcccggctgatgcggcgcgcgaggtggagcaggcagcgcagcgacggcgcgtcggcgtggtgcacgtcgtcgatgccgatcagtacgggccgctccgcggcgagcgtcagcaccgtgcgggtgagttcggtccccaggcggttgtcgacgtcggccggcaggttttcgcacgatgccgtcagccggaccagctccggtgtccgggcggccagctcgggctggtcgaggagctggccgagcatgccgtacggcagggcccgctcctccatggagcacaccgcgcgaagggtgacgaagccggccttggccgcggcggcgtcgaggagttcggtcttgccgcaggcgatcggcccggtgacggcggcgacgacgccccgcccgccccccgctcgggtgagcgcccggtggagggaaccgaactcgtcatcgcgggcgatcaggtctgggggagataagcgcgctatcacgaatggaactacctcgcgaccgtcgtggaaacccataggcatcacatggcttgttgatctgtacggctgtgattcagcctggcgggatgctgtgctacagatgggaagatgtgatctagggccgtgccgttccctcaggagccgaccgcccccggcgccacccgccgtaccccctgggccaccagctcggcgacccgctcctggtggtcgacgaggtagaagtgcccgccggggaagacctccaccgtggtcggcgcggtcgtgtgcccggcccaggcgtgggcctgctccaccgtcgtcttcggatcgtcgtcaccgatgcacaccgtgatcggcgtctccagcggcggcgcgggctcccaccggtacgtctccgccgcgtagtagtccgcccgcaacggcgccaggatcagcgcgcgcatttcgtcgtccgccatcacatcggcgctcgtcccgccgaggccgatgaccgccgccagcagctcgtcgtcggacgcgaggtggtcctggtcggcgcgcggctgcgacggcgcccgccggcccgagacgatcaggtgcgccaccgggagccgctgggccagctcgaacgcgagtgtcgcgcccatgctgtggccgaacagcaccagcggacggtccagccccggcttcaacgcctcggccacgaggccggcgagaacacgcaggtcgcgcaccgcctcctcgtcgcggcggtcctggcggccggggtactgcacggcgtacacgtccgccaccggggcgagcgcacgggccagcggaaggtagaacgtcgccgatccgccggcgtggggcagcagcaccacccgtaccggggcctcgggcgtggggaagaactgccgcagccagagttccgagctcaccgcaccccctcggccgcgacctggggagcccggaaccgggtgatctcggccaagtgcttctcccgcatctccgggtcggtcacgccccatccctcctccggcgccagacagaggacgccgactttgccgttgtgcacattgcgatgcacatcgcgcaccgccgacccgacgtcgtcgagcgggtaggtcaccgacagcgtcgggtgcaccatccccttgcagatcaggcggttcgcctcccacgcctcacgatagttcgcgaagtgggtaccgatgatccgcttcacggacatccacaggtaccgattgtcaaaggcgtgctcgtatcccgaggttgacgcgcaggtgacgatcgtgccaccccgacgtgtcacgtagacactcgcgccgaacgtcgcgcgccccgggtgctcgaacacgatgtcgggatcgtcaccgccggtcagctcccggatc

SEQ ID NO: 2 - protein, 360 aa, Streptomyces sp.
MTIVKCLVWDLDNTLWRGTVLEDDEVVLTDEIREVITTLDDRGILQAVASKNDHDLAWERLERLGVAEYFVLARIGWGPKSQSVREIATELNFAPTTIAFIDDQPAERAEVAFHLPEVRCYPAEQAATLLSLPEFSPPVSTVDSRRRRLMYQAGFARDQAREAYSGPDEDFLRSLDLSMTIAPAGEEELSRVEELTLRTSQMNATGVHYSDADLRALLTDPAHEVLVVTMGDRFGPHGAVGIILLEKKPSTWHLKLLATSCRVVSFGAGATILNWLTDQGARAGAHLVADFRRTDRNRMMEIAYRFAGFADSDCPCVSEVAGASAAGVERLHLEPSARPAPTTLTLTAADIAPVTVSAAG

SEQ ID NO: 3 - DNA, 22 bp, Artificial Sequence
  Description of Artificial Sequence: Linker
ctagtgggcagatctggcagct

SEQ ID NO: 4 - DNA, 14 bp, Artificial Sequence
  Description of Artificial Sequence: Linker
gccagatctgccca

SEQ ID NO: 5 - DNA, 12 bp, Artificial Sequence
  Description of Artificial Sequence: Linker
gggatgcatggc

SEQ ID NO: 6 - DNA, 20 bp, Artificial Sequence
  Description of Artificial Sequence: Linker
ttaagccatgcatccccatg

SEQ ID NO: 7 - DNA, 24 bp, Artificial Sequence
  Description of Artificial Sequence: primer
cgactcactagtgggcagatctgg

SEQ ID NO: 8 - DNA, 29 bp, Artificial Sequence
  Description of Artificial Sequence: primer
cacgcctaggccggtcggtctcgggccac

SEQ ID NO: 9 - DNA, 30 bp, Artificial Sequence
  Description of Artificial Sequence: primer
gcggctagctgctcgcccatcgcgggatgc

SEQ ID NO: 10 - DNA, 35 bp, Artificial Sequence
  Description of Artificial Sequence: primer
gatgtacagctcgagtcggcacgcccggccgcatc

SEQ ID NO: 11 - DNA, 23 bp, Artificial Sequence
  Description of Artificial Sequence: primer
cgactcacttaagccatgcatcc

SEQ ID NO: 12 - DNA, 31 bp, Artificial Sequence
  Description of Artificial Sequence: primer
atcctaggcgggcrggygtgtcgtccttcgg

SEQ ID NO: 13 - DNA, 32 bp, Artificial Sequence
  Description of Artificial Sequence: primer
atgctagccgccgcgttccccgtcttcgcgcg

SEQ ID NO: 14 - DNA, 32 bp, Artificial Sequence
  Description of Artificial Sequence: primer
atgctagcggattcgtcggtggtgttcgccga

SEQ ID NO: 15 - DNA, 31 bp, Artificial Sequence
  Description of Artificial Sequence: primer
atctcgagccagtascgctggtgytggaagg

SEQ ID NO: 16 - DNA, 4478 bp, Artificial Sequence
  Description of Artificial Sequence: DNA encoding synthetic PKS synthase fragment
  CDS (3)..(4466)
agatctggcagctcgccgaagcgctgctgacgctcgtccgggagagcaccgccgccgtgctcggccacgtgggtggcgaggacatccccgcgacggcggcgttcaaggacctcggcatcgactcgctcaccgcggtccagctgcgcaacgccctcaccgaggcgaccggtgtgcggctgaacgccacggcggtcttcgacttcccgaccccgcacgtgctcgccgggaagctcggcgacgaactgaccggcacccgcgcgcccgtcgtgccccggaccgcggccacggccggtgcgcacgacgagccgctggcgatcgtgggaatggcctgccggctgcccggcggggtcgcgtcacccgaggagctgtggcacctcgtggcatccggcaccgacgccatcacggagttcccgacggaccgcggctgggacgtcgacgcgatctacgacccggaccccgacgcgatcggcaagaccttcgtccggcacggtggcttcctcaccggcgcgacaggcttcgacgcggcgttcttcggcatcagcccgcgcgaggccctcgcgatggacccgcagcagcgggtgctcctggagacgtcgtgggaggcgttcgaaagcgccggcatcaccccggactcgacccgcggcagcgacaccggcgtgttcgtcggcgccttctcctacggttacggcaccggtgcggacaccgacggcttcggcgcgaccggctcgcagaccagtgtgctctccggccggctgtcgtacttctacggtctggagggtccggcggtcacggtcgacacggcgtgttcgtcgtcgctggtggcgctgcaccaggccgggcagtcgctgcgctccggcgaatgctcgctcgccctggtcggcggcgtcacggtgatggcgtctcccggcggcttcgtggagttctcccggcagcgcggcctcgcgccggacggccgggcgaaggcgttcggcgcgggtgcggacggcacgagcttcgccgagggtgccggtgtgctgatcgtcgagaggctctccgacgccgaacgcaacggtcacaccgtcctggcggtcgtccgtggttcggcggtcaaccaggatggtgcctccaacgggctgtcggcgccgaacgggccgtcgcaggagcgggtgatccggcaggccctggccaacgccgggctcaccccggcggacgtggacgccgtcgaggcccacggcaccggcaccaggctgggcgaccccatcgaggcacaggcggtactggccacctacggacaggagcgcgccacccccctgctgctgggctcgctgaagtccaacatcggccacgcccaggccgcgtccggcgtcgccggcatcatcaagatggtgcaggccctccggcacggggagctgccgccgacgctgcacgccgacgagccgtcgccgcacgtcgactggacggccggcgccgtcgaactgctgacgtcggcccggccgtggcccgagaccgaccggcctaggcgggcaggcgtgtcgtccttcgggatcagtggcaccaacgcccacgtcatcctggaaagcgcaccccccactcagcctgcggacaacgcggtgatcgagcgggcaccggagtgggtgccgttggtgatttcggccaggacccagtcggctttgactgagcacgagggccggttgcgtgcgtatctggcggcgtcgcccggggtggatatgcgggctgtggcatcgacgctggcgatgacacggtcggtgttcgagcaccgtgccgtgctgctgggagatgacaccgtcaccggcaccgctgtgtctgaccctcgggcggtgttcgtcttcccgggacaggggtcgcagcgtgctggcatgggtgaggaactggccgccgcgttccccgtcttcgcgcggatccatcagcaggtgtgggacctgctcgatgtgcccgatctggaggtgaacgagaccggttacgcccagccggccctgttcgcaatgcaggtggctctgttcgggctgctggaatcgtggggtgtacgaccggacgcggtgatcggccattcggtgggtgagcttgcggctgcgtatgtgtccggggtgtggtcgttggaggatgcctgcactttggtgtcggcgcgggctcgtctgatgcaggctctgcccgcgggtggggtgatggtcgctgtcccggtctcggaggatgaggcccgggccgtgctgggtgagggtgtggagatcgccgcggtcaacggcccgtcgtcggtggttctctccggtgatgaggccgccgtgctgcaggccgcggaggggctggggaagtggacgcggctggcgaccagccacgcgttccattccgcccgtatggaacccatgctggaggagttccgggcggtcgccgaaggcctgacctaccggacgccgcaggtctccatggccgttggtgatcaggtgaccaccgctgagtactgggtgcggcaggtccgggacacggtccggttcggcgagcaggtggcctcgtacgaggacgccgtgttcgtcgagctgggtgccgaccggtcactggcccgcctggtcgacggtgtcgcgatgctgcacggcgaccacgaaatccaggccgcgatcggcgccctggcccacctgtatgtcaacggcgtcacggtcgactggcccgcgctcctgggcgatgctccggcaacacgggtgctggaccttccgacatacgccttccagcaccagcgctactggctcgagtcggcacgcccggccgcatccgacgcgggccaccccgtgctgggctccggtatcgccctcgccgggtcgccgggccgggtgttcacgggttccgtgccgaccggtgcggaccgcgcggtgttcgtcgccgagctggcgctggccgccgcggacgcggtcgactgcgccacggtcgagcggctcgacatcgcctccgtgcccggccggccgggccatggccggacgaccgtacagacctgggtcgacgagccggcggacgacggccggcgccggttcaccgtgcacacccgcaccggcgacgccccgtggacgctgcacgccgagggggtgctgcgcccccatggcacggccctgcccgatgcggccgacgccgagtggcccccaccgggcgcggtgcccgcggacgggctgccgggtgtgtggcgccggggggaccaggtcttcgccgaggccgaggtggacggaccggacggtttcgtggtgcaccccgacctgctcgacgcggtcttctccgcggtcggcgacggaagccgccagccggccggatggcgcgacctgacggtgcacgcgtcggacgccaccgtactgcgcgcctgcctcacccggcgcaccgacggagccatgggattcgccgccttcgacggcgccggcctgccggtactcaccgcggaggcggtgacgctgcgggaggtggcgtcaccgtccggctccgaggagtcggacggcctgcaccggttggagtggctcgcggtcgccgaggcggtctacgacggtgacctgcccgagggacatgtcctgatcaccgccgcccaccccgacgaccccgaggacatacccacccgcgcccacacccgcgccacccgcgtcctgaccgccctgcaacaccacctcaccaccaccgaccacaccctcatcgtccacaccaccaccgaccccgccggcgccaccgtcaccggcctcacccgcaccgcccagaacgaacacccccaccgcatccgcctcatcgaaaccgaccacccccacacccccctccccctggcccaactcgccaccctcgaccacccccacctccgcctcacccaccacaccctccaccacccccacctcacccccctccacaccaccaccccacccaccaccacccccctcaaccccgaacacgccatcatcatcaccggcggctccggcaccctcgccggcatcctcgcccgccacctgaaccacccccacacctacctcctctcccgcaccccaccccccgacgccacccccggcacccacctcccctgcgacgtcggcgacccccaccaactcgccaccaccctcacccacatcccccaacccctcaccgccatcttccacaccgccgccaccctcgacgacggcatcctccacgccctcacccccgaccgcctcaccaccgtcctccaccccaaagccaacgccgcctggcacctgcaccacctcacccaaaaccaacccctcacccacttcgtcctctactccagcgccgccgccgtcctcggcagccccggacaaggaaactacgccgccgccaacgccttcctcgacgccctcgccacccaccgccacaccctcggccaacccgccacctccatcgcctggggcatgtggcacaccaccagcaccctcaccggacaactcgacgacgccgaccgggaccgcatccgccgcggcggtttcctcccgatcacggacgacgagggcatggggatgcat

SEQ ID NO: 17 - protein, 1488 aa, Artificial Sequence
  Description of Artificial Sequence: Synthetic PKS synthase fragment
IWQLAEALLTLVRESTAAVLGHVGGEDIPATAAFKDLGIDSLTAVQLRNALTEATGVRLNATAVFDFPTPHVLAGKLGDELTGTRAPVVPRTAATAGAHDEPLAIVGMACRLPGGVASPEELWHLVASGTDAITEFPTDRGWDVDAIYDPDPDAIGKTFVRHGGFLTGATGFDAAFFGISPREALAMDPQQRVLLETSWEAFESAGITPDSTRGSDTGVFVGAFSYGYGTGADTDGFGATGSQTSVLSGRLSYFYGLEGPAVTVDTACSSSLVALHQAGQSLRSGECSLALVGGVTVMASPGGFVEFSRQRGLAPDGRAKAFGAGADGTSFAEGAGVLIVERLSDAERNGHTVLAVVRGSAVNQDGASNGLSAPNGPSQERVIRQALANAGLTPADVDAVEAHGTGTRLGDPIEAQAVLATYGQERATPLLLGSLKSNIGHAQAASGVAGIIKMVQALRHGELPPTLHADEPSPHVDWTAGAVELLTSARPWPETDRPRRAGVSSFGISGTNAHVILESAPPTQPADNAVIERAPEWVPLVISARTQSALTEHEGRLRAYLAASPGVDMRAVASTLAMTRSVFEHRAVLLGDDTVTGTAVSDPRAVFVFPGQGSQRAGMGEELAAAFPVFARIHQQVWDLLDVPDLEVNETGYAQPALFAMQVALFGLLESWGVRPDAVIGHSVGELAAAYVSGVWSLEDACTLVSARARLMQALPAGGVMVAVPVSEDEARAVLGEGVEIAAVNGPSSVVLSGDEAAVLQAAEGLGKWTRLATSHAFHSARMEPMLEEFRAVAEGLTYRTPQVSMAVGDQVTTAEYWVRQVRDTVRFGEQVASYEDAVFVELGADRSLARLVDGVAMLHGDHEIQAAIGALAHLYVNGVTVDWPALLGDAPATRVLDLPTYAFQHQRYWLESARPAASDAGHPVLGSGIALAGSPGRVFTGSVPTGADRAVFVAELALAAADAVDCATVERLDIASVPGRPGHGRTTVQTWVDEPADDGRRRFTVHTRTGDAPWTLHAEGVLRPHGTALPDAADAEWPPPGAVPADGLPGVWRRGDQVFAEAEVDGPDGFVVHPDLLDAVFSAVGDGSRQPAGWRDLTVHASDATVLRACLTRRTDGAMGFAAFDGAGLPVLTAEAVTLREVASPSGSEESDGLHRLEWLAVAEAVYDGDLPEGHVLITAAHPDDPEDIPTRAHTRATRVLTALQHHLTTTDHTLIVHTTTDPAGATVTGLTRTAQNEHPHRIRLIETDHPHTPLPLAQLATLDHPHLRLTHHTLHHPHLTPLHTTTPPTTTPLNPEHAIIITGGSGTLAGILARHLNHPHTYLLSRTPPPDATPGTHLPCDVGDPHQLATTLTHIPQPLTAIFHTAATLDDGILHALTPDRLTTVLHPKANAAWHLHHLTQNQPLTHFVLYSSAAAVLGSPGQGNYAAANAFLDALATHRHTLGQPATSIAWGMWHTTSTLTGQLDDADRDRIRRGGFLPITDDEG

SEQ ID NO: 18 - DNA, 4571 bp, Artificial Sequence
  Description of Artificial Sequence: DNA encoding synthetic PKS synthase fragment
  CDS (9)..(4559)
agatctggcagctcgccgaagcgctgctgacgctcgtccgggagagcaccgccgccgtgctcggccacgtgggtggcgaggacatccccgcgacggcggcgttcaaggacctcggcatcgactcgctcaccgcggtccagctgcgcaacgccctcaccgaggcgaccggtgtgcggctgaacgccacggcggtcttcgacttcccgaccccgcacgtgctcgccgggaagctcggcgacgaactgaccggcacccgcgcgcccgtcgtgccccggaccgcggccacggccggtgcgcacgacgagccgctggcgatcgtgggaatggcctgccggctgcccggcggggtcgcgtcacccgaggagctgtggcacctcgtggcatccggcaccgacgccatcacggagttcccgacggaccgcggctgggacgtcgacgcgatctacgacccggaccccgacgcgatcggcaagaccttcgtccggcacggtggcttcctcaccggcgcgacaggcttcgacgcggcgttcttcggcatcagcccgcgcgaggccctcgcgatggacccgcagcagcgggtgctcctggagacgtcgtgggaggcgttcgaaagcgccggcatcaccccggactcgacccgcggcagcgacaccggcgtgttcgtcggcgccttctcctacggttacggcaccggtgcggacaccgacggcttcggcgcgaccggctcgcagaccagtgtgctctccggccggctgtcgtacttctacggtctggagggtccggcggtcacggtcgacacggcgtgttcgtcgtcgctggtggcgctgcaccaggccgggcagtcgctgcgctccggcgaatgctcgctcgccctggtcggcggcgtcacggtgatggcgtctcccggcggcttcgtggagttctcccggcagcgcggcctcgcgccggacggccgggcgaaggcgttcggcgcgggtgcggacggcacgagcttcgccgagggtgccggtgtgctgatcgtcgagaggctctccgacgccgaacgcaacggtcacaccgtcctggcggtcgtccgtggttcggcggtcaaccaggatggtgcctccaacgggctgtcggcgccgaacgggccgtcgcaggagcgggtgatccggcaggccctggccaacgccgggctcaccccggcggacgtggacgccgtcgaggcccacggcaccggcaccaggctgggcgaccccatcgaggcacaggcggtactggccacctacggacaggagcgcgccacccccctgctgctgggctcgctgaagtccaacatcggccacgcccaggccgcgtccggcgtcgccggcatcatcaagatggtgcaggccctccggcacggggagctgccgccgacgctgcacgccgacgagccgtcgccgcacgtcgactggacggccggcgccgtcgaactgctgacgtcggcccggccgtggcccgagaccgaccggcctaggcgggcgggcgtgtcgtccttcggagtcagcggcaccaacgcccacgtcatcctggagagcgcaccccccgctcagcccgcggaggaggcgcagcctgttgagacgccggtggtggcctcggatgtgctgccgctggtgatatcggccaagacccagcccgccctgaccgaacacgaagaccggctgcgcgcctacctggcggcgtcgcccggggcggatatacgggctgtggcatcgacgctggcggtgacacggtcggtgttcgagcaccgcgccgtactccttggagatgacaccgtcaccggcaccgcggtgaccgaccccaggatcgtgtttgtctttcccgggcaggggtggcagtggctggggatgggcagtgcactgcgcgattcgtcggtggtgttcgccgagcggatggccgagtgtgcggcggcgttgcgcgagttcgtggactgggatctgttcacggttctggatgatccggcggtggtggaccgggttgatgtggtccagcccgcttcctgggcgatgatggtttccctggccgcggtgtggcaggcggccggtgtgcggccggatgcggtgatcggccattcgcagggtgagatcgccgcagcttgtgtggcgggtgcggtgtcactacgcgatgccgcccggatcgtgaccttgcgcagccaggcgatcgcccggggcctggcgggccggggcgcgatggcatccgtcgccctgcccgcgcaggatgtcgagctggtcgacggggcctggatcgccgcccacaacgggcccgcctccaccgtgatcgcgggcaccccggaagcggtcgaccatgtcctcaccgctcatgaggcacaaggggtgcgggtgcggcggatcaccgtcgactatgcctcgcacaccccgcacgtcgagctgatccgcgacgaactactcgacatcactagcgacagcagctcgcagaccccgctcgtgccgtggctgtcgaccgtggacggcacctgggtcgacagcccgctggacggggagtactggtaccggaacctgcgtgaaccggtcggtttccaccccgccgtcagccagttgcaggcccagggcgacaccgtgttcgtcgaggtcagcgccagcccggtgttgttgcaggcgatggacgacgatgtcgtcacggttgccacgctgcgtcgtgacgacggcgacgccacccggatgctcaccgccctggcacaggcctatgtccacggcgtcaccgtcgactggcccgccatcctcggcaccaccacaacccgggtactggaccttccgacctacgccttccaacaccagcggtactggctcgagtcggcacgcccggccgcatccgacgcgggccaccccgtgctgggctccggtatcgccctcgccgggtcgccgggccgggtgttcacgggttccgtgccgaccggtgcggaccgcgcggtgttcgtcgccgagctggcgctggccgccgcggacgcggtcgactgcgccacggtcgagcggctcgacatcgcctccgtgcccggccggccgggccatggccggacgaccgtacagacctgggtcgacgagccggcggacgacggccggcgccggttcaccgtgcacacccgcaccggcgacgccccgtggacgctgcacgccgagggggtgctgcgcccccatggcacggccctgcccgatgcggccgacgccgagtggcccccaccgggcgcggtgcccgcggacgggctgccgggtgtgtggcgccggggggaccaggtcttcgccgaggccgaggtggacggaccggacggtttcgtggtgcaccccgacctgctcgacgcggtcttctccgcggtcggcgacggaagccgccagccggccggatggcgcgacctgacggtgcacgcgtcggacgccaccgtactgcgcgcctgcctcacccggcgcaccgacggagccatgggattcgccgccttcgacggcgccggcctgccggtactcaccgcggaggcggtgacgctgcgggaggtggcgtcaccgtccggctccgaggagtcggacggcctgcaccggttggagtggctcgcggtcgccgaggcggtctacgacggtgacctgcccgagggacatgtcctgatcaccgccgcccaccccgacgaccccgaggacatacccacccgcgcccacacccgcgccacccgcgtcctgaccgccctgcaacaccacctcaccaccaccgaccacaccctcatcgtccacaccaccaccgaccccgccggcgccaccgtcaccggcctcacccgcaccgcccagaacgaacacccccaccgcatccgcctcatcgaaaccgaccacccccacacccccctccccctggcccaactcgccaccctcgaccacccccacctccgcctcacccaccacaccctccaccacccccacctcacccccctccacaccaccaccccacccaccaccacccccctcaaccccgaacacgccatcatcatcaccggcggctccggcaccctcgccggcatcctcgcccgccacctgaaccacccccacacctacctcctctcccgcaccccaccccccgacgccacccccggcacccacctcccctgcgacgtcggcgacccccaccaactcgccaccaccctcacccacatcccccaacccctcaccgccatcttccacaccgccgccaccctcgacgacggcatcctccacgccctcacccccgaccgcctcaccaccgtcctccaccccaaagccaacgccgcctggcacctgcaccacctcacccaaaaccaacccctcacccacttcgtcctctactccagcgccgccgccgtcctcggcagccccggacaaggaaactacgccgccgccaacgccttcctcgacgccctcgccacccaccgccacaccctcggccaacccgccacctccatcgcctggggcatgtggcacaccaccagcaccctcaccggacaactcgacgacgccgaccgggaccgcatccgccgcggcggtttcctcccgatcacggacgacgagggcatggggatgcat

SEQ ID NO: 19 - protein, 1517 aa, Artificial Sequence
  Description of Artificial Sequence: Synthetic PKS synthase fragment
QLAEALLTLVRESTAAVLGHVGGEDIPATAAFKDLGIDSLTAVQLRNALTEATGVRLNATAVFDFPTPHVLAGKLGDELTGTRAPVVPRTAATAGAHDEPLAIVGMACRLPGGVASPEELWHLVASGTDAITEFPTDRGWDVDAIYDPDPDAIGKTFVRHGGFLTGATGFDAAFFGISPREALAMDPQQRVLLETSWEAFESAGITPDSTRGSDTGVFVGAFSYGYGTGADTDGFGATGSQTSVLSGRLSYFYGLEGPAVTVDTACSSSLVALHQAGQSLRSGECSLALVGGVTVMASPGGFVEFSRQRGLAPDGRAKAFGAGADGTSFAEGAGVLIVERLSDAERNGHTVLAVVRGSAVNQDGASNGLSAPNGPSQERVIRQALANAGLTPADVDAVEAHGTGTRLGDPIEAQAVLATYGQERATPLLLGSLKSNIGHAQAASGVAGIIKMVQALRHGELPPTLHADEPSPHVDWTAGAVELLTSARPWPETDRPRRAGVSSFGVSGTNAHVILESAPPAQPAEEAQPVETPVVASDVLPLVISAKTQPALTEHEDRLRAYLAASPGADIRAVASTLAVTRSVFEHRAVLLGDDTVTGTAVTDPRIVFVFPGQGWQWLGMGSALRDSSVVFAERMAECAAALREFVDWDLFTVLDDPAVVDRVDVVQPASWAMMVSLAAVWQAAGVRPDAVIGHSQGEIAAACVAGAVSLRDAARIVTLRSQAIARGLAGRGAMASVALPAQDVELVDGAWIAAHNGPASTVIAGTPEAVDHVLTAHEAQGVRVRRITVDYASHTPHVELIRDELLDITSDSSSQTPLVPWLSTVDGTWVDSPLDGEYWYRNLREPVGFHPAVSQLQAQGDTVFVEVSASPVLLQAMDDDVVTVATLRRDDGDATRMLTALAQAYVHGVTVDWPAILGTTTTRVLDLPTYAFQHQRYWLESARPAASDAGHPVLGSGIALAGSPGRVFTGSVPTGADRAVFVAELALAAADAVDCATVERLDIASVPGRPGHGRTTVQTWVDEPADDGRRRFTVHTRTGDAPWTLHAEGVLRPHGTALPDAADAEWPPPGAVPADGLPGVWRRGDQVFAEAEVDGPDGFVVHPDLLDAVFSAVGDGSRQPAGWRDLTVHASDATVLRACLTRRTDGAMGFAAFDGAGLPVLTAEAVTLREVASPSGSEESDGLHRLEWLAVAEAVYDGDLPEGHVLITAAHPDDPEDIPTRAHTRATRVLTALQHHLTTTDHTLIVHTTTDPAGATVTGLTRTAQNEHPHRIRLIETDHPHTPLPLAQLATLDHPHLRLTHHTLHHPHLTPLHTTTPPTTTPLNPEHAIIITGGSGTLAGILARHLNHPHTYLLSRTPPPDATPGTHLPCDVGDPHQLATTLTHIPQPLTAIFHTAATLDDGILHALTPDRLTTVLHPKANAAWHLHHLTQNQPLTHFVLYSSAAAVLGSPGQGNYAAANAFLDALATHRHTLGQPATSIAWGMWHTTSTLTGQLDDADRDRIRRGGFLPITDDEG

SEQ ID NO: 20 - DNA, 4466 bp, Artificial Sequence
  Description of Artificial Sequence: DNA encoding synthetic PKS synthase fragment
  CDS (9)..(4454)
agatctggcagctcgccgaagcgctgctgacgctcgtccgggagagcaccgccgccgtgctcggccacgtgggtggcgaggacatccccgcgacggcggcgttcaaggacctcggcatcgactcgctcaccgcggtccagctgcgcaacgccctcaccgaggcgaccggtgtgcggctgaacgccacggcggtcttcgacttcccgaccccgcacgtgctcgccgggaagctcggcgacgaactgaccggcacccgcgcgcccgtcgtgccccggaccgcggccacggccggtgcgcacgacgagccgctggcgatcgtgggaatggcctgccggctgcccggcggggtcgcgtcacccgaggagctgtggcacctcgtggcatccggcaccgacgccatcacggagttcccgacggaccgcggctgggacgtcgacgcgatctacgacccggaccccgacgcgatcggcaagaccttcgtccggcacggtggcttcctcaccggcgcgacaggcttcgacgcggcgttcttcggcatcagcccgcgcgaggccctcgcgatggacccgcagcagcgggtgctcctggagacgtcgtgggaggcgttcgaaagcgccggcatcaccccggactcgacccgcggcagcgacaccggcgtgttcgtcggcgccttctcctacggttacggcaccggtgcggacaccgacggcttcggcgcgaccggctcgcagaccagtgtgctctccggccggctgtcgtacttctacggtctggagggtccggcggtcacggtcgacacggcgtgttcgtcgtcgctggtggcgctgcaccaggccgggcagtcgctgcgctccggcgaatgctcgctcgccctggtcggcggcgtcacggtgatggcgtctcccggcggcttcgtggagttctcccggcagcgcggcctcgcgccggacggccgggcgaaggcgttcggcgcgggtgcggacggcacgagcttcgccgagggtgccggtgtgctgatcgtcgagaggctctccgacgccgaacgcaacggtcacaccgtcctggcggtcgtccgtggttcggcggtcaaccaggatggtgcctccaacgggctgtcggcgccgaacgggccgtcgcaggagcgggtgatccggcaggccctggccaacgccgggctcaccccggcggacgtggacgccgtcgaggcccacggcaccggcaccaggctgggcgaccccatcgaggcacaggcggtactggccacctacggacaggagcgcgccacccccctgctgctgggctcgctgaagtccaacatcggccacgcccaggccgcgtccggcgtcgccggcatcatcaagatggtgcaggccctccggcacggggagctgccgccgacgctgcacgccgacgagccgtcgccgcacgtcgactggacggccggcgccgtcgaactgctgacgtcggcccggccgtggcccgagaccgaccggccacggcgtgccgccgtctcctcgttcggggtgagcggcaccaacgcccacgtcatcctggaggccggaccggtaacggagacgcccgcggcatcgccttccggtgaccttcccctgctggtgtcggcacgctcaccggaagcgctcgacgagcagatccgccgactgcgcgcctacctggacaccaccccggacgtcgaccgggtggccgtggcacagacgctggcccggcgcacacacttcgcccaccgcgccgtgctgctcggtgacaccgtcatcaccacaccccccgcggaccggcccgacgaactcgtcttcgtctactccggccagggcacccagcatcccgcgatgggcgagcagctagccgccgcgttccccgtcttcgcgcggatccatcagcaggtgtgggacctgctcgatgtgcccgatctggaggtgaacgagaccggttacgcccagccggccctgttcgcaatgcaggtggctctgttcgggctgctggaatcgtggggtgtacgaccggacgcggtgatcggccattcggtgggtgagcttgcggctgcgtatgtgtccggggtgtggtcgttggaggatgcctgcactttggtgtcggcgcgggctcgtctgatgcaggctctgcccgcgggtggggtgatggtcgctgtcccggtctcggaggatgaggcccgggccgtgctgggtgagggtgtggagatcgccgcggtcaacggcccgtcgtcggtggttctctccggtgatgaggccgccgtgctgcaggccgcggaggggctggggaagtggacgcggctggcgaccagccacgcgttccattccgcccgtatggaacccatgctggaggagttccgggcggtcgccgaaggcctgacctaccggacgccgcaggtctccatggccgttggtgatcaggtgaccaccgctgagtactgggtgcggcaggtccgggacacggtccggttcggcgagcaggtggcctcgtacgaggacgccgtgttcgtcgagctgggtgccgaccggtcactggcccgcctggtcgacggtgtcgcgatgctgcacggcgaccacgaaatccaggccgcgatcggcgccctggcccacctgtatgtcaacggcgtcacggtcgactggcccgcgctcctgggcgatgctccggcaacacgggtgctggaccttccgacatacgccttccagcaccagcgctactggctcgagtcggcacgcccggccgcatccgacgcgggccaccccgtgctgggctccggtatcgccctcgccgggtcgccgggccgggtgttcacgggttccgtgccgaccggtgcggaccgcgcggtgttcgtcgccgagctggcgctggccgccgcggacgcggtcgactgcgccacggtcgagcggctcgacatcgcctccgtgcccggccggccgggccatggccggacgaccgtacagacctgggtcgacgagccggcggacgacggccggcgccggttcaccgtgcacacccgcaccggcgacgccccgtggacgctgcacgccgagggggtgctgcgcccccatggcacggccctgcccgatgcggccgacgccgagtggcccccaccgggcgcggtgcccgcggacgggctgccgggtgtgtggcgccggggggaccaggtcttcgccgaggccgaggtggacggaccggacggtttcgtggtgcaccccgacctgctcgacgcggtcttctccgcggtcggcgacggaagccgccagccggccggatggcgcgacctgacggtgcacgcgtcggacgccaccgtactgcgcgcctgcctcacccggcgcaccgacggagccatgggattcgccgccttcgacggcgccggcctgccggtactcaccgcggaggcggtgacgctgcgggaggtggcgtcaccgtccggctccgaggagtcggacggcctgcaccggttggagtggctcgcggtcgccgaggcggtctacgacggtgacctgcccgagggacatgtcctgatcaccgccgcccaccccgacgaccccgaggacatacccacccgcgcccacacccgcgccacccgcgtcctgaccgccctgcaacaccacctcaccaccaccgaccacaccctcatcgtccacaccaccaccgaccccgccggcgccaccgtcaccggcctcacccgcaccgcccagaacgaacacccccaccgcatccgcctcatcgaaaccgaccacccccacacccccctccccctggcccaactcgccaccctcgaccacccccacctccgcctcacccaccacaccctccaccacccccacctcacccccctccacaccaccaccccacccaccaccacccccctcaaccccgaacacgccatcatcatcaccggcggctccggcaccctcgccggcatcctcgcccgccacctgaaccacccccacacctacctcctctcccgcaccccaccccccgacgccacccccggcacccacctcccctgcgacgtcggcgacccccaccaactcgccaccaccctcacccacatcccccaacccctcaccgccatcttccacaccgccgccaccctcgacgacggcatcctccacgccctcacccccgaccgcctcaccaccgtcctccaccccaaagccaacgccgcctggcacctgcaccacctcacccaaaaccaacccctcacccacttcgtcctctactccagcgccgccgccgtcctcggcagccccggacaaggaaactacgccgccgccaacgccttcctcgacgccctcgccacccaccgccacaccctcggccaacccgccacctccatcgcctggggcatgtggcacaccaccagcaccctcaccggacaactcgacgacgccgaccgggaccgcatccgccgcggcggtttcctcccgatcacggacgacgagggcatggggatgcat

SEQ ID NO: 21 - protein, 1482 aa, Artificial Sequence
  Description of Artificial Sequence: Synthetic PKS synthase fragment
QLAEALLTLVRESTAAVLGHVGGEDIPATAAFKDLGIDSLTAVQLRNALTEATGVRLNATAVFDFPTPHVLAGKLGDELTGTRAPVVPRTAATAGAHDEPLAIVGMACRLPGGVASPEELWHLVASGTDAITEFPTDRGWDVDAIYDPDPDAIGKTFVRHGGFLTGATGFDAAFFGISPREALAMDPQQRVLLETSWEAFESAGITPDSTRGSDTGVFVGAFSYGYGTGADTDGFGATGSQTSVLSGRLSYFYGLEGPAVTVDTACSSSLVALHQAGQSLRSGECSLALVGGVTVMASPGGFVEFSRQRGLAPDGRAKAFGAGADGTSFAEGAGVLIVERLSDAERNGHTVLAVVRGSAVNQDGASNGLSAPNGPSQERVIRQALANAGLTPADVDAVEAHGTGTRLGDPIEAQAVLATYGQERATPLLLGSLKSNIGHAQAASGVAGIIKMVQALRHGELPPTLHADEPSPHVDWTAGAVELLTSARPWPETDRPRRAAVSSFGVSGTNAHVILEAGPVTETPAASPSGDLPLLVSARSPEALDEQIRRLRAYLDTTPDVDRVAVAQTLARRTHFAHRAVLLGDTVITTPPADRPDELVFVYSGQGTQHPAMGEQLAAAFPVFARIHQQVWDLLDVPDLEVNETGYAQPALFAMQVALFGLLESWGVRPDAVIGHSVGELAAAYVSGVWSLEDACTLVSARARLMQALPAGGVMVAVPVSEDEARAVLGEGVEIAAVNGPSSVVLSGDEAAVLQAAEGLGKWTRLATSHAFHSARMEPMLEEFRAVAEGLTYRTPQVSMAVGDQVTTAEYWVRQVRDTVRFGEQVASYEDAVFVELGADRSLARLVDGVAMLHGDHEIQAAIGALAHLYVNGVTVDWPALLGDAPATRVLDLPTYAFQHQRYWLESARPAASDAGHPVLGSGIALAGSPGRVFTGSVPTGADRAVFVAELALAAADAVDCATVERLDIASVPGRPGHGRTTVQTWVDEPADDGRRRFTVHTRTGDAPWTLHAEGVLRPHGTALPDAADAEWPPPGAVPADGLPGVWRRGDQVFAEAEVDGPDGFVVHPDLLDAVFSAVGDGSRQPAGWRDLTVHASDATVLRACLTRRTDGAMGFAAFDGAGLPVLTAEAVTLREVASPSGSEESDGLHRLEWLAVAEAVYDGDLPEGHVLITAAHPDDPEDIPTRAHTRATRVLTALQHHLTTTDHTLIVHTTTDPAGATVTGLTRTAQNEHPHRIRLIETDHPHTPLPLAQLATLDHPHLRLTHHTLHHPHLTPLHTTTPPTTTPLNPEHAIIITGGSGTLAGILARHLNHPHTYLLSRTPPPDATPGTHLPCDVGDPHQLATTLTHIPQPLTAIFHTAATLDDGILHALTPDRLTTVLHPKANAAWHLHHLTQNQPLTHFVLYSSAAAVLGSPGQGNYAAANAFLDALATHRHTLGQPATSIAWGMWHTTSTLTGQLDDADRDRIRRGGFLPITDDEG

SEQ ID NO: 22 - DNA, 4547 bp, Artificial Sequence
  Description of Artificial Sequence: DNA encoding synthetic PKS synthase fragment
  CDS (9)..(4535)
agatctggcagctcgccgaagcgctgctgacgctcgtccgggagagcaccgccgccgtgctcggccacgtgggtggcgaggacatccccgcgacggcggcgttcaaggacctcggcatcgactcgctcaccgcggtccagctgcgcaacgccctcaccgaggcgaccggtgtgcggctgaacgccacggcggtcttcgacttcccgaccccgcacgtgctcgccgggaagctcggcgacgaactgaccggcacccgcgcgcccgtcgtgccccggaccgcggccacggccggtgcgcacgacgagccgctggcgatcgtgggaatggcctgccggctgcccggcggggtcgcgtcacccgaggagctgtggcacctcgtggcatccggcaccgacgccatcacggagttcccgacggaccgcggctgggacgtcgacgcgatctacgacccggaccccgacgcgatcggcaagaccttcgtccggcacggtggcttcctcaccggcgcgacaggcttcgacgcggcgttcttcggcatcagcccgcgcgaggccctcgcgatggacccgcagcagcgggtgctcctggagacgtcgtgggaggcgttcgaaagcgccggcatcaccccggactcgacccgcggcagcgacaccggcgtgttcgtcggcgccttctcctacggttacggcaccggtgcggacaccgacggcttcggcgcgaccggctcgcagaccagtgtgctctccggccggctgtcgtacttctacggtctggagggtccggcggtcacggtcgacacggcgtgttcgtcgtcgctggtggcgctgcaccaggccgggcagtcgctgcgctccggcgaatgctcgctcgccctggtcggcggcgtcacggtgatggcgtctcccggcggcttcgtggagttctcccggcagcgcggcctcgcgccggacggccgggcgaaggcgttcggcgcgggtgcggacggcacgagcttcgccgagggtgccggtgtgctgatcgtcgagaggctctccgacgccgaacgcaacggtcacaccgtcctggcggtcgtccgtggttcggcggtcaaccaggatggtgcctccaacgggctgtcggcgccgaacgggccgtcgcaggagcgggtgatccggcaggccctggccaacgccgggctcaccccggcggacgtggacgccgtcgaggcccacggcaccggcaccaggctgggcgaccccatcgaggcacaggcggtactggccacctacggacaggagcgcgccacccccctgctgctgggctcgctgaagtccaacatcggccacgcccaggccgcgtccggcgtcgccggcatcatcaagatggtgcaggccctccggcacggggagctgccgccgacgctgcacgccgacgagccgtcgccgcacgtcgactggacggccggcgccgtcgaactgctgacgtcggcccggccgtggcccgagaccgaccggccacggcgtgccgccgtctcctcgttcggggtgagcggcaccaacgcccacgtcatcctggaggccggaccggtaacggagacgcccgcggcatcgccttccggtgaccttcccctgctggtgtcggcacgctcaccggaagcgctcgacgagcagatccgccgactgcgcgcctacctggacaccaccccggacgtcgaccgggtggccgtggcacagacgctggcccggcgcacacacttcgcccaccgcgccgtgctgctcggtgacaccgtcatcaccacaccccccgcggaccggcccgacgaactcgtcttcgtctactccggccagggcacccagcatcccgcgatgggcgagcagctagccgattcgtcggtggtgttcgccgagcggatggccgagtgtgcggcggcgttgcgcgagttcgtggactgggatctgttcacggttctggatgatccggcggtggtggaccgggttgatgtggtccagcccgcttcctgggcgatgatggtttccctggccgcggtgtggcaggcggccggtgtgcggccggatgcggtgatcggccattcgcagggtgagatcgccgcagcttgtgtggcgggtgcggtgtcactacgcgatgccgcccggatcgtgaccttgcgcagccaggcgatcgcccggggcctggcgggccggggcgcgatggcatccgtcgccctgcccgcgcaggatgtcgagctggtcgacggggcctggatcgccgcccacaacgggcccgcctccaccgtgatcgcgggcaccccggaagcggtcgaccatgtcctcaccgctcatgaggcacaaggggtgcgggtgcggcggatcaccgtcgactatgcctcgcacaccccgcacgtcgagctgatccgcgacgaactactcgacatcactagcgacagcagctcgcagaccccgctcgtgccgtggctgtcgaccgtggacggcacctgggtcgacagcccgctggacggggagtactggtaccggaacctgcgtgaaccggtcggtttccaccccgccgtcagccagttgcaggcccagggcgacaccgtgttcgtcgaggtcagcgccagcccggtgttgttgcaggcgatggacgacgatgtcgtcacggttgccacgctgcgtcgtgacgacggcgacgccacccggatgctcaccgccctggcacaggcctatgtccacggcgtcaccgtcgactggcccgccatcctcggcaccaccacaacccgggtactggaccttccgacctacgccttccaacaccagcggtactggctcgagtcggcacgcccggccgcatccgacgcgggccaccccgtgctgggctccggtatcgccctcgccgggtcgccgggccgggtgttcacgggttccgtgccgaccggtgcggaccgcgcggtgttcgtcgccgagctggcgctggccgccgcggacgcggtcgactgcgccacggtcgagcggctcgacatcgcctccgtgcccggccggccgggccatggccggacgaccgtacagacctgggtcgacgagccggcggacgacggccggcgccggttcaccgtgcacacccgcaccggcgacgccccgtggacgctgcacgccgagggggtgctgcgcccccatggcacggccctgcccgatgcggccgacgccgagtggcccccaccgggcgcggtgcccgcggacgggctgccgggtgtgtggcgccggggggaccaggtcttcgccgaggccgaggtggacggaccggacggtttcgtggtgcaccccgacctgctcgacgcggtcttctccgcggtcggcgacggaagccgccagccggccggatggcgcgacctgacggtgcacgcgtcggacgccaccgtactgcgcgcctgcctcacccggcgcaccgacggagccatgggattcgccgccttcgacggcgccggcctgccggtactcaccgcggaggcggtgacgctgcgggaggtggcgtcaccgtccggctccgaggagtcggacggcctgcaccggttggagtggctcgcggtcgccgaggcggtctacgacggtgacctgcccgagggacatgtcctgatcaccgccgcccaccccgacgaccccgaggacatacccacccgcgcccacacccgcgccacccgcgtcctgaccgccctgcaacaccacctcaccaccaccgaccacaccctcatcgtccacaccaccaccgaccccgccggcgccaccgtcaccggcctcacccgcaccgcccagaacgaacacccccaccgcatccgcctcatcgaaaccgaccacccccacacccccctccccctggcccaactcgccaccctcgaccacccccacctccgcctcacccaccacaccctccaccacccccacctcacccccctccacaccaccaccccacccaccaccacccccctcaaccccgaacacgccatcatcatcaccggcggctccggcaccctcgccggcatcctcgcccgccacctgaaccacccccacacctacctcctctcccgcaccccaccccccgacgccacccccggcacccacctcccctgcgacgtcggcgacccccaccaactcgccaccaccctcacccacatcccccaacccctcaccgccatcttccacaccgccgccaccctcgacgacggcatcctccacgccctcacccccgaccgcctcaccaccgtcctccaccccaaagccaacgccgcctggcacctgcaccacctcacccaaaaccaacccctcacccacttcgtcctctactccagcgccgccgccgtcctcggcagccccggacaaggaaactacgccgccgccaacgccttcctcgacgccctcgccacccaccgccacaccctcggccaacccgccacctccatcgcctggggcatgtggcacaccaccagcaccctcaccggacaactcgacgacgccgaccgggaccgcatccgccgcggcggtttcctcccgatcacggacgacgagggcatggggatgcat

SEQ ID NO: 23 - protein, 1509 aa, Artificial Sequence
  Description of Artificial Sequence: Synthetic PKS synthase fragment
QLAEALLTLVRESTAAVLGHVGGEDIPATAAFKDLGIDSLTAVQLRNALTEATGVRLNATAVFDFPTPHVLAGKLGDELTGTRAPVVPRTAATAGAHDEPLAIVGMACRLPGGVASPEELWHLVASGTDAITEFPTDRGWDVDAIYDPDPDAIGKTFVRHGGFLTGATGFDAAFFGISPREALAMDPQQRVLLETSWEAFESAGITPDSTRGSDTGVFVGAFSYGYGTGADTDGFGATGSQTSVLSGRLSYFYGLEGPAVTVDTACSSSLVALHQAGQSLRSGECSLALVGGVTVMASPGGFVEFSRQRGLAPDGRAKAFGAGADGTSFAEGAGVLIVERLSDAERNGHTVLAVVRGSAVNQDGASNGLSAPNGPSQERVIRQALANAGLTPADVDAVEAHGTGTRLGDPIEAQAVLATYGQERATPLLLGSLKSNIGHAQAASGVAGIIKMVQALRHGELPPTLHADEPSPHVDWTAGAVELLTSARPWPETDRPRRAAVSSFGVSGTNAHVILEAGPVTETPAASPSGDLPLLVSARSPEALDEQIRRLRAYLDTTPDVDRVAVAQTLARRTHFAHRAVLLGDTVITTPPADRPDELVFVYSGQGTQHPAMGEQLADSSVVFAERMAECAAALREFVDWDLFTVLDDPAVVDRVDVVQPASWAMMVSLAAVWQAAGVRPDAVIGHSQGEIAAACVAGAVSLRDAARIVTLRSQAIARGLAGRGAMASVALPAQDVELVDGAWIAAHNGPASTVIAGTPEAVDHVLTAHEAQGVRVRRITVDYASHTPHVELIRDELLDITSDSSSQTPLVPWLSTVDGTWVDSPLDGEYWYRNLREPVGFHPAVSQLQAQGDTVFVEVSASPVLLQAMDDDVVTVATLRRDDGDATRMLTALAQAYVHGVTVDWPAILGTTTTRVLDLPTYAFQHQRYWLESARPAASDAGHPVLGSGIALAGSPGRVFTGSVPTGADRAVFVAELALAAADAVDCATVERLDIASVPGRPGHGRTTVQTWVDEPADDGRRRFTVHTRTGDAPWTLHAEGVLRPHGTALPDAADAEWPPPGAVPADGLPGVWRRGDQVFAEAEVDGPDGFVVHPDLLDAVFSAVGDGSRQPAGWRDLTVHASDATVLRACLTRRTDGAMGFAAFDGAGLPVLTAEAVTLREVASPSGSEESDGLHRLEWLAVAEAVYDGDLPEGHVLITAAHPDDPEDIPTRAHTRATRVLTALQHHLTTTDHTLIVHTTTDPAGATVTGLTRTAQNEHPHRIRLIETDHPHTPLPLAQLATLDHPHLRLTHHTLHHPHLTPLHTTTPPTTTPLNPEHAIIITGGSGTLAGILARHLNHPHTYLLSRTPPPDATPGTHLPCDVGDPHQLATTLTHIPQPLTAIFHTAATLDDGILHALTPDRLTTVLHPKANAAWHLHHLTQNQPLTHFVLYSSAAAVLGSPGQGNYAAANAFLDALATHRHTLGQPATSIAWGMWHTTSTLTGQLDDADRDRIRRGGFLPITDDEG

SEQ ID NO: 24 - DNA, 4725 bp, Artificial Sequence
  Description of Artificial Sequence: DNA encoding synthetic PKS synthase fragment
  CDS (3)..(4724)
gcatgcggctgtacgaggcggcacggcgcaccggaagtcccgtggtggtggcggccgcgctcgacgacgcgccggacgtgccgctgctgcgcgggctgcggcgtacgaccgtccggcgtgccgccgtccgggaacgctctctcgccgaccgctcgccgtgctgcccgacgacgagcgcgccgacgcctccctcgcgttcgtcctggaacagcaccgccaccgtgctcggccacctgggcgccgaagacatcccggcgacgacgacgttcaaggaactcggcatcgactcgctcaccgcggtccagctgcgcaacgcgctgaccacggcgaccggcgtacgcctcaacgccacagcggtcttcgactttccgacgccgcgcgcgctcgccgcgagactcggcgacgagctggccggtacccgcgcgcccgtcgcggcccggaccgcggccaccgcggccgcgcacgacgaaccgctggcgatcgtgggcatggcctgccgtctgccgggcggggtcgcgtcgccacaggagctgtggcgtctcgtcgcgtccggcaccgacgccatcacggagttccccgcggaccgcggctgggacgtggacgcgctctacgacccggaccccgacgcgatcggcaagaccttcgtccggcacggcggcttcctcgacggtgcgaccggcttcgacgcggcgttcttcgggatcagcccgcgcgaggccctggccatggacccgcagcaacgggtgctcctggagacgtcctgggaggcgttcgaaagcgcgggcatcaccccggacgcggcgcggggcagcgacaccggcgtgttcatcggcgcgttctcctacgggtacggcacgggtgcggataccaacggcttcggcgcgacagggtcgcagaccagcgtgctctccggccgcctctcgtacttctacggtctggagggcccttcggtcacggtcgacaccgcctgctcgtcgtcactggtcgccctgcaccaggcagggcagtccctgcgctcgggcgaatgctcgctcgccctggtcggcggtgtcacggtgatggcgtcgcccggcggattcgtcgagttctcccggcagcgcgggctcgcgccggacgggcgggcgaaggcgttcggcgcgggcgcggacggtacgagcttcgccgagggcgccggtgccctggtggtcgagcggctctccgacgcggagcgccacggccacaccgtcctcgccctcgtacgcggctccgcggctaactccgacggcgcgtcgaacggtctgtcggcgccgaacggcccctcccaggaacgcgtcatccaccaggccctcgcgaacgcgaaactcacccccgccgatgtcgacgcggtcgaggcgcacggcaccggcacccgcctcggcgaccccatcgaggcgcaggcgctgctcgcgacgtacggacaggaccgggcgacgcccctgctgctcggctcgctgaagtcgaacatcgggcacgcccaggccgcgtcaggggtcgccgggatcatcaagatggtgcaggccatccggcacggggaactgccgccgacactgcacgcggacgagccgtcgccgcacgtcgactggacggccggtgccgtcgagctcctgacgtcggcccggccgtggccggggaccggtcgcccgcgccgcgctgccgtctcgtcgttcggcgtgagcggcacgaacgcccacatcatccttgaggcaggaccggtcaaaacgggaccggtcgaggcaggagcgatcgaggcaggaccggtcgaagtaggaccggtcgaggctggaccgctccccgcggcgccgccgtcagcaccgggcgaagaccttccgctgctcgtgtcggcgcgttccccggaggcactcgacgagcagatcgggcgcctgcgcgcctatctcgacaccggcccgggcgtcgaccgggcggccgtggcgcagacactggcccggcgtacgcacttcacccaccgggccgtactgctcggggacaccgtcatcggcgctccccccgcggaccaggccgacgaactcgtcttcgtctactccggtcagggcacccagcatcccgcgatgggcgagcaactcgcggccgcgttccccgtgttcgccgatgcctggcacgacgcgctccgacggctcgacgaccccgacccgcacgaccccacacggagccagcacacgctcttcgcccaccaggcggcgttcaccgccctcctgaggtcctgggacatcacgccgcacgccgtcatcggccactcgctcggcgagatcaccgccgcgtacgccgccgggatcctgtcgctcgacgacgcctgcaccctgatcaccacgcgtgcccgcctcatgcacacgcttccgccgcccggcgccatggtcaccgtgctgaccagcgaggaggaggcccgtcaggcgctgcggccgggcgtggagatcgccgcggtcttcggcccgcactccgtcgtgctctcgggcgacgaggacgccgtgctcgacgtcgcacagcggctcggcatccaccaccgtctgcccgcgccgcacgcgggccactccgcgcacatggaacccgtggccgccgagctgctcgccaccactcgcgagctccgttacgaccggccccacaccgccatcccgaacgaccccaccaccgccgagtactgggccgagcaggtccgcaaccccgtgctgttccacgcccacacccagcggtaccccgacgccgtgttcgtcgagatcggccccggccaggacctctcaccgctggtcgacggcatcgccctgcagaacggcacggcggacgaggtgcacgcgctgcacaccgcgctcgcccgcctcttcacacgcggcgccacgctcgactggtcccgcatcctcggcggtgcttcgcggcacgaccctgacgtcccctcgtacgcgttccagcggcgtccctactggatcgagtcggctcccccggccacggccgactcgggccaccccgtcctcggcaccggagtcgccgtcgccgggtcgccgggccgggtgttcacgggtcccgtgcccgccggtgcggaccgcgcggtgttcatcgccgaactggcgctcgccgccgccgacgccaccgactgcgccacggtcgaacagctcgacgtcacctccgtgcccggcggatccgcccgcggcagggccaccgcgcagacctgggtcgatgaacccgccgccgacgggcggcgccgcttcaccgtccacacccgcgtcggcgacgccccgtggacgctgcacgccgagggggttctccgccccggccgcgtgccccagcccgaagccgtcgacaccgcctggcccccgccgggcgcggtgcccgcggacgggctgcccggggcgtggcgacgcgcggaccaggtcttcgtcgaagccgaagtcgacagccctgacggcttcgtggcacaccccgacctgctcgacgcggtcttctccgcggtcggcgacgggagccgccagccgaccggatggcgcgacctcgcggtgcacgcgtcggacgccaccgtgctgcgcgcctgcctcacccgccgcgacagtggtgtcgtggagctcgccgccttcgacggtgccggaatgccggtgctcaccgcggagtcggtgacgctgggcgaggtcgcgtcggcaggcggatccgacgagtcggacggtctgcttcggcttgagtggttgccggtggcggaggcccactacgacggtgccgacgagctgcccgagggctacaccctcatcaccgccacacaccccgacgaccccgacgaccccaccaacccccacaacacacccacacgcacccacacacaaaccacacgcgtcctcaccgccctccaacaccacctcatcaccaccaaccacaccctcatcgtccacaccaccaccgaccccccaggcgccgccgtcaccggcctcacccgcaccgcacaaaacgaacaccccggccgcatccacctcatcgaaacccaccacccccacaccccactccccctcacccaactcaccaccctccaccaaccccacctacgcctcaccaacaacaccctccacaccccccacctcacccccatcaccacccaccacaacaccaccacaaccacccccaacaccccacccctcaaccccaaccacgccatcctcatcaccggcggctccggcaccctcgccggcatcctcgcccgccacctcaaccacccccacacctacctcctctcccgcacaccaccaccccccaccacacccggcacccacatcccctgcgacctcaccgaccccacccaaatcacccaagccctcacccacataccacaacccctcaccggcatcttccacaccgccgccaccctcgacgacgccaccctcaccaacctcaccccccaacacctcaccaccaccctccaacccaaagccgacgccgcctggcacctccaccaccacacccaaaaccaacccctcacccacttcgtcctctactccagcgccgccgccaccctcggcagccccggccaagccaactacgccgccgccaacgccttcctcgacgccctcgccacccaccgccacacccaaggacaacccgccaccaccatcgcctggggcatgtggcacaccaccaccacactcaccagccaactcaccgacagcgaccgcgaccgcatccgccgcggcggcttcctgccgatctcggacgacgagggcatgc

SEQ ID NO: 25 - protein, 1574 aa, Artificial Sequence
  Description of Artificial Sequence: Synthetic PKS synthase fragment
MRLYEAARRTGSPVVVAAALDDAPDVPLLRGLRRTTVRRAAVRERSLADRSPCCPTTSAPTPPSRSSWNSTATVLGHLGAEDIPATTTFKELGIDSLTAVQLRNALTTATGVRLNATAVFDFPTPRALAARLGDELAGTRAPVAARTAATAAAHDEPLAIVGMACRLPGGVASPQELWRLVASGTDAITEFPADRGWDVDALYDPDPDAIGKTFVRHGGFLDGATGFDAAFFGISPREALAMDPQQRVLLETSWEAFESAGITPDAARGSDTGVFIGAFSYGYGTGADTNGFGATGSQTSVLSGRLSYFYGLEGPSVTVDTACSSSLVALHQAGQSLRSGECSLALVGGVTVMASPGGFVEFSRQRGLAPDGRAKAFGAGADGTSFAEGAGALVVERLSDAERHGHTVLALVRGSAANSDGASNGLSAPNGPSQERVIHQALANAKLTPADVDAVEAHGTGTRLGDPIEAQALLATYGQDRATPLLLGSLKSNIGHAQAASGVAGIIKMVQAIRHGELPPTLHADEPSPHVDWTAGAVELLTSARPWPGTGRPRRAAVSSFGVSGTNAHIILEAGPVKTGPVEAGAIEAGPVEVGPVEAGPLPAAPPSAPGEDLPLLVSARSPEALDEQIGRLRAYLDTGPGVDRAAVAQTLARRTHFTHRAVLLGDTVIGAPPADQADELVFVYSGQGTQHPAMGEQLAAAFPVFADAWHDALRRLDDPDPHDPTRSQHTLFAHQAAFTALLRSWDITPHAVIGHSLGEITAAYAAGILSLDDACTLITTRARLMHTLPPPGAMVTVLTSEEEARQALRPGVEIAAVFGPHSVVLSGDEDAVLDVAQRLGIHHRLPAPHAGHSAHMEPVAAELLATTRELRYDRPHTAIPNDPTTAEYWAEQVRNPVLFHAHTQRYPDAVFVEIGPGQDLSPLVDGIALQNGTADEVHALHTALARLFTRGATLDWSRILGGASRHDPDVPSYAFQRRPYWIESAPPATADSGHPVLGTGVAVAGSPGRVFTGPVPAGADRAVFIAELALAAADATDCATVEQLDVTSVPGGSARGRATAQTWVDEPAADGRRRFTVHTRVGDAPWTLHAEGVLRPGRVPQPEAVDTAWPPPGAVPADGLPGAWRRADQVFVEAEVDSPDGFVAHPDLLDAVFSAVGDGSRQPTGWRDLAVHASDATVLRACLTRRDSGVVELAAFDGAGMPVLTAESVTLGEVASAGGSDESDGLLRLEWLPVAEAHYDGADELPEGYTLITATHPDDPDDPTNPHNTPTRTHTQTTRVLTALQHHLITTNHTLIVHTTTDPPGAAVTGLTRTAQNEHPGRIHLIETHHPHTPLPLTQLTTLHQPHLRLTNNTLHTPHLTPITTHHNTTTTTPNTPPLNPNHAILITGGSGTLAGILARHLNHPHTYLLSRTPPPPTTPGTHIPCDLTDPTQITQALTHIPQPLTGIFHTAATLDDATLTNLTPQHLTTTLQPKADAAWHLHHHTQNQPLTHFVLYSSAAATLGSPGQANYAAANAFLDALATHRHTQGQPATTIAWGMWHTTTTLTSQLTDSDRDRIRRGGFLPISDDEGM

SEQ ID NO: 26 - DNA, 4674 bp, Artificial Sequence
  Description of Artificial Sequence: DNA encoding synthetic PKS synthase fragment
  CDS (3)..(4673)
gcatgcggctgtacgaggcggcacggcgcaccggaagtcccgtggtggtggcggccgcgctcgacgacgcgccggacgtgccgctgctgcgcgggctgcggcgtacgaccgtccggcgtgccgccgtccgggaacgctctctcgccgaccgctcgccgtgctgcccgacgacgagcgcgccgacgcctccctcgcgttcgtcctggaacagcaccgccaccgtgctcggccacctgggcgccgaagacatcccggcgacgacgacgttcaaggaactcggcatcgactcgctcaccgcggtccagctgcgcaacgcgctgaccacggcgaccggcgtacgcctcaacgccacagcggtcttcgactttccgacgccgcgcgcgctcgccgcgagactcggcgacgagctggccggtacccgcgcgcccgtcgcggcccggaccgcggccaccgcggccgcgcacgacgaaccgctggcgatcgtgggcatggcctgccgtctgccgggcggggtcgcgtcgccacaggagctgtggcgtctcgtcgcgtccggcaccgacgccatcacggagttccccgcggaccgcggctgggacgtggacgcgctctacgacccggaccccgacgcgatcggcaagaccttcgtccggcacggcggcttcctcgacggtgcgaccggcttcgacgcggcgttcttcgggatcagcccgcgcgaggccctggccatggacccgcagcaacgggtgctcctggagacgtcctgggaggcgttcgaaagcgcgggcatcaccccggacgcggcgcggggcagcgacaccggcgtgttcatcggcgcgttctcctacgggtacggcacgggtgcggataccaacggcttcggcgcgacagggtcgcagaccagcgtgctctccggccgcctctcgtacttctacggtctggagggcccttcggtcacggtcgacaccgcctgctcgtcgtcactggtcgccctgcaccaggcagggcagtccctgcgctcgggcgaatgctcgctcgccctggtcggcggtgtcacggtgatggcgtcgcccggcggattcgtcgagttctcccggcagcgcgggctcgcgccggacgggcgggcgaaggcgttcggcgcgggcgcggacggtacgagcttcgccgagggcgccggtgccctggtggtcgagcggctctccgacgcggagcgccacggccacaccgtcctcgccctcgtacgcggctccgcggctaactccgacggcgcgtcgaacggtctgtcggcgccgaacggcccctcccaggaacgcgtcatccaccaggccctcgcgaacgcgaaactcacccccgccgatgtcgacgcggtcgaggcgcacggcaccggcacccgcctcggcgaccccatcgaggcgcaggcgctgctcgcgacgtacggacaggaccgggcgacgcccctgctgctcggctcgctgaagtcgaacatcgggcacgcccaggccgcgtcaggggtcgccgggatcatcaagatggtgcaggccatccggcacggggaactgccgccgacactgcacgcggacgagccgtcgccgcacgtcgactggacggccggtgccgtcgagctcctgacgtcggcccggccgtggccggggaccggtcgccctaggcgggcaggcgtgtcgtccttcgggatcagtggcaccaacgcccacgtcatcctggaaagcgcaccccccactcagcctgcggacaacgcggtgatcgagcgggcaccggagtgggtgccgttggtgatttcggccaggacccagtcggctttgactgagcacgagggccggttgcgtgcgtatctggcggcgtcgcccggggtggatatgcgggctgtggcatcgacgctggcgatgacacggtcggtgttcgagcaccgtgccgtgctgctgggagatgacaccgtcaccggcaccgctgtgtctgaccctcgggcggtgttcgtcttcccgggacaggggtcgcagcgtgctggcatgggtgaggaactggccgccgcgttccccgtcttcgcgcggatccatcagcaggtgtgggacctgctcgatgtgcccgatctggaggtgaacgagaccggttacgcccagccggccctgttcgcaatgcaggtggctctgttcgggctgctggaatcgtggggtgtacgaccggacgcggtgatcggccattcggtgggtgagcttgcggctgcgtatgtgtccggggtgtggtcgttggaggatgcctgcactttggtgtcggcgcgggctcgtctgatgcaggctctgcccgcgggtggggtgatggtcgctgtcccggtctcggaggatgaggcccgggccgtgctgggtgagggtgtggagatcgccgcggtcaacggcccgtcgtcggtggttctctccggtgatgaggccgccgtgctgcaggccgcggaggggctggggaagtggacgcggctggcgaccagccacgcgttccattccgcccgtatggaacccatgctggaggagttccgggcggtcgccgaaggcctgacctaccggacgccgcaggtctccatggccgttggtgatcaggtgaccaccgctgagtactgggtgcggcaggtccgggacacggtccggttcggcgagcaggtggcctcgtacgaggacgccgtgttcgtcgagctgggtgccgaccggtcactggcccgcctggtcgacggtgtcgcgatgctgcacggcgaccacgaaatccaggccgcgatcggcgccctggcccacctgtatgtcaacggcgtcacggtcgactggcccgcgctcctgggcgatgctccggcaacacgggtgctggaccttccgacatacgccttccagcaccagcgctactggctcgagtcggctcccccggccacggccgactcgggccaccccgtcctcggcaccggagtcgccgtcgccgggtcgccgggccgggtgttcacgggtcccgtgcccgccggtgcggaccgcgcggtgttcatcgccgaactggcgctcgccgccgccgacgccaccgactgcgccacggtcgaacagctcgacgtcacctccgtgcccggcggatccgcccgcggcagggccaccgcgcagacctgggtcgatgaacccgccgccgacgggcggcgccgcttcaccgtccacacccgcgtcggcgacgccccgtggacgctgcacgccgagggggttctccgccccggccgcgtgccccagcccgaagccgtcgacaccgcctggcccccgccgggcgcggtgcccgcggacgggctgcccggggcgtggcgacgcgcggaccaggtcttcgtcgaagccgaagtcgacagccctgacggcttcgtggcacaccccgacctgctcgacgcggtcttctccgcggtcggcgacgggagccgccagccgaccggatggcgcgacctcgcggtgcacgcgtcggacgccaccgtgctgcgcgcctgcctcacccgccgcgacagtggtgtcgtggagctcgccgccttcgacggtgccggaatgccggtgctcaccgcggagtcggtgacgctgggcgaggtcgcgtcggcaggcggatccgacgagtcggacggtctgcttcggcttgagtggttgccggtggcggaggcccactacgacggtgccgacgagctgcccgagggctacaccctcatcaccgccacacaccccgacgaccccgacgaccccaccaacccccacaacacacccacacgcacccacacacaaaccacacgcgtcctcaccgccctccaacaccacctcatcaccaccaaccacaccctcatcgtccacaccaccaccgaccccccaggcgccgccgtcaccggcctcacccgcaccgcacaaaacgaacaccccggccgcatccacctcatcgaaacccaccacccccacaccccactccccctcacccaactcaccaccctccaccaaccccacctacgcctcaccaacaacaccctccacaccccccacctcacccccatcaccacccaccacaacaccaccacaaccacccccaacaccccacccctcaaccccaaccacgccatcctcatcaccggcggctccggcaccctcgccggcatcctcgcccgccacctcaaccacccccacacctacctcctctcccgcacaccaccaccccccaccacacccggcacccacatcccctgcgacctcaccgaccccacccaaatcacccaagccctcacccacataccacaacccctcaccggcatcttccacaccgccgccaccctcgacgacgccaccctcaccaacctcaccccccaacacctcaccaccaccctccaacccaaagccgacgccgcctggcacctccaccaccacacccaaaaccaacccctcacccacttcgtcctctactccagcgccgccgccaccctcggcagccccggccaagccaactacgccgccgccaacgccttcctcgacgccctcgccacccaccgccacacccaaggacaacccgccaccaccatcgcctggggcatgtggcacaccaccaccacactcaccagccaactcaccgacagcgaccgcgaccgcatccgccgcggcggcttcctgccgatctcggacgacgagggcatgc

SEQ ID NO: 27 - protein, 1557 aa, Artificial Sequence
  Description of Artificial Sequence: Synthetic PKS synthase fragment
MRLYEAARRTGSPVVVAAALDDAPDVPLLRGLRRTTVRRAAVRERSLADRSPCCPTTSAPTPPSRSSWNSTATVLGHLGAEDIPATTTFKELGIDSLTAVQLRNALTTATGVRLNATAVFDFPTPRALAARLGDELAGTRAPVAARTAATAAAHDEPLAIVGMACRLPGGVASPQELWRLVASGTDAITEFPADRGWDVDALYDPDPDAIGKTFVRHGGFLDGATGFDAAFFGISPREALAMDPQQRVLLETSWEAFESAGITPDAARGSDTGVFIGAFSYGYGTGADTNGFGATGSQTSVLSGRLSYFYGLEGPSVTVDTACSSSLVALHQAGQSLRSGECSLALVGGVTVMASPGGFVEFSRQRGLAPDGRAKAFGAGADGTSFAEGAGALVVERLSDAERHGHTVLALVRGSAANSDGASNGLSAPNGPSQERVIHQALANAKLTPADVDAVEAHGTGTRLGDPIEAQALLATYGQDRATPLLLGSLKSNIGHAQAASGVAGIIKMVQAIRHGELPPTLHADEPSPHVDWTAGAVELLTSARPWPGTGRPRRAGVSSFGISGTNAHVILESAPPTQPADNAVIERAPEWVPLVISARTQSALTEHEGRLRAYLAASPGVDMRAVASTLAMTRSVFEHRAVLLGDDTVTGTAVSDPRAVFVFPGQGSQRAGMGEELAAAFPVFARIHQQVWDLLDVPDLEVNETGYAQPALFAMQVALFGLLESWGVRPDAVIGHSVGELAAAYVSGVWSLEDACTLVSARARLMQALPAGGVMVAVPVSEDEARAVLGEGVEIAAVNGPSSVVLSGDEAAVLQAAEGLGKWTRLATSHAFHSARMEPMLEEFRAVAEGLTYRTPQVSMAVGDQVTTAEYWVRQVRDTVRFGEQVASYEDAVFVELGADRSLARLVDGVAMLHGDHEIQAAIGALAHLYVNGVTVDWPALLGDAPATRVLDLPTYAFQHQRYWLESAPPATADSGHPVLGTGVAVAGSPGRVFTGPVPAGADRAVFIAELALAAADATDCATVEQLDVTSVPGGSARGRATAQTWVDEPAADGRRRFTVHTRVGDAPWTLHAEGVLRPGRVPQPEAVDTAWPPPGAVPADGLPGAWRRADQVFVEAEVDSPDGFVAHPDLLDAVFSAVGDGSRQPTGWRDLAVHASDATVLRACLTRRDSGVVELAAFDGAGMPVLTAESVTLGEVASAGGSDESDGLLRLEWLPVAEAHYDGADELPEGYTLITATHPDDPDDPTNPHNTPTRTHTQTTRVLTALQHHLITTNHTLIVHTTTDPPGAAVTGLTRTAQNEHPGRIHLIETHHPHTPLPLTQLTTLHQPHLRLTNNTLHTPHLTPITTHHNTTTTTPNTPPLNPNHAILITGGSGTLAGILARHLNHPHTYLLSRTPPPPTTPGTHIPCDLTDPTQITQALTHIPQPLTGIFHTAATLDDATLTNLTPQHLTTTLQPKADAAWHLHHHTQNQPLTHFVLYSSAAATLGSPGQANYAAANAFLDALATHRHTQGQPATTIAWGMWHTTTTLTSQLTDSDRDRIRRGGFLPISDDEGM

SEQ ID NO: 28 - DNA, 4767 bp, Artificial Sequence
  Description of Artificial Sequence: DNA encoding synthetic PKS synthase fragment
  CDS (3)..(4766)
gcatgcggctgtacgaggcggcacggcgcaccggaagtcccgtggtggtggcggccgcgctcgacgacgcgccggacgtgccgctgctgcgcgggctgcggcgtacgaccgtccggcgtgccgccgtccgggaacgctctctcgccgaccgctcgccgtgctgcccgacgacgagcgcgccgacgcctccctcgcgttcgtcctggaacagcaccgccaccgtgctcggccacctgggcgccgaagacatcccggcgacgacgacgttcaaggaactcggcatcgactcgctcaccgcggtccagctgcgcaacgcgctgaccacggcgaccggcgtacgcctcaacgccacagcggtcttcgactttccgacgccgcgcgcgctcgccgcgagactcggcgacgagctggccggtacccgcgcgcccgtcgcggcccggaccgcggccaccgcggccgcgcacgacgaaccgctggcgatcgtgggcatggcctgccgtctgccgggcggggtcgcgtcgccacaggagctgtggcgtctcgtcgcgtccggcaccgacgccatcacggagttccccgcggaccgcggctgggacgtggacgcgctctacgacccggaccccgacgcgatcggcaagaccttcgtccggcacggcggcttcctcgacggtgcgaccggcttcgacgcggcgttcttcgggatcagcccgcgcgaggccctggccatggacccgcagcaacgggtgctcctggagacgtcctgggaggcgttcgaaagcgcgggcatcaccccggacgcggcgcggggcagcgacaccggcgtgttcatcggcgcgttctcctacgggtacggcacgggtgcggataccaacggcttcggcgcgacagggtcgcagaccagcgtgctctccggccgcctctcgtacttctacggtctggagggcccttcggtcacggtcgacaccgcctgctcgtcgtcactggtcgccctgcaccaggcagggcagtccctgcgctcgggcgaatgctcgctcgccctggtcggcggtgtcacggtgatggcgtcgcccggcggattcgtcgagttctcccggcagcgcgggctcgcgccggacgggcgggcgaaggcgttcggcgcgggcgcggacggtacgagcttcgccgagggcgccggtgccctggtggtcgagcggctctccgacgcggagcgccacggccacaccgtcctcgccctcgtacgcggctccgcggctaactccgacggcgcgtcgaacggtctgtcggcgccgaacggcccctcccaggaacgcgtcatccaccaggccctcgcgaacgcgaaactcacccccgccgatgtcgacgcggtcgaggcgcacggcaccggcacccgcctcggcgaccccatcgaggcgcaggcgctgctcgcgacgtacggacaggaccgggcgacgcccctgctgctcggctcgctgaagtcgaacatcgggcacgcccaggccgcgtcaggggtcgccgggatcatcaagatggtgcaggccatccggcacggggaactgccgccgacactgcacgcggacgagccgtcgccgcacgtcgactggacggccggtgccgtcgagctcctgacgtcggcccggccgtggccggggaccggtcgccctaggcgggcgggcgtgtcgtccttcggagtcagcggcaccaacgcccacgtcatcctggagagcgcaccccccgctcagcccgcggaggaggcgcagcctgttgagacgccggtggtggcctcggatgtgctgccgctggtgatatcggccaagacccagcccgccctgaccgaacacgaagaccggctgcgcgcctacctggcggcgtcgcccggggcggatatacgggctgtggcatcgacgctggcggtgacacggtcggtgttcgagcaccgcgccgtactccttggagatgacaccgtcaccggcaccgcggtgaccgaccccaggatcgtgtttgtctttcccgggcaggggtggcagtggctggggatgggcagtgcactgcgcgattcgtcggtggtgttcgccgagcggatggccgagtgtgcggcggcgttgcgcgagttcgtggactgggatctgttcacggttctggatgatccggcggtggtggaccgggttgatgtggtccagcccgcttcctgggcgatgatggtttccctggccgcggtgtggcaggcggccggtgtgcggccggatgcggtgatcggccattcgcagggtgagatcgccgcagcttgtgtggcgggtgcggtgtcactacgcgatgccgcccggatcgtgaccttgcgcagccaggcgatcgcccggggcctggcgggccggggcgcgatggcatccgtcgccctgcccgcgcaggatgtcgagctggtcgacggggcctggatcgccgcccacaacgggcccgcctccaccgtgatcgcgggcaccccggaagcggtcgaccatgtcctcaccgctcatgaggcacaaggggtgcgggtgcggcggatcaccgtcgactatgcctcgcacaccccgcacgtcgagctgatccgcgacgaactactcgacatcactagcgacagcagctcgcagaccccgctcgtgccgtggctgtcgaccgtggacggcacctgggtcgacagcccgctggacggggagtactggtaccggaacctgcgtgaaccggtcggtttccaccccgccgtcagccagttgcaggcccagggcgacaccgtgttcgtcgaggtcagcgccagcccggtgttgttgcaggcgatggacgacgatgtcgtcacggttgccacgctgcgtcgtgacgacggcgacgccacccggatgctcaccgccctggcacaggcctatgtccacggcgtcaccgtcgactggcccgccatcctcggcaccaccacaacccgggtactggaccttccgacctacgccttccaacaccagcggtactggctcgagtcggctcccccggccacggccgactcgggccaccccgtcctcggcaccggagtcgccgtcgccgggtcgccgggccgggtgttcacgggtcccgtgcccgccggtgcggaccgcgcggtgttcatcgccgaactggcgctcgccgccgccgacgccaccgactgcgccacggtcgaacagctcgacgtcacctccgtgcccggcggatccgcccgcggcagggccaccgcgcagacctgggtcgatgaacccgccgccgacgggcggcgccgcttcaccgtccacacccgcgtcggcgacgccccgtggacgctgcacgccgagggggttctccgccccggccgcgtgccccagcccgaagccgtcgacaccgcctggcccccgccgggcgcggtgcccgcggacgggctgcccggggcgtggcgacgcgcggaccaggtcttcgtcgaagccgaagtcgacagccctgacggcttcgtggcacaccccgacctgctcgacgcggtcttctccgcggtcggcgacgggagccgccagccgaccggatggcgcgacctcgcggtgcacgcgtcggacgccaccgtgctgcgcgcctgcctcacccgccgcgacagtggtgtcgtggagctcgccgccttcgacggtgccggaatgccggtgctcaccgcggagtcggtgacgctgggcgaggtcgcgtcggcaggcggatccgacgagtcggacggtctgcttcggcttgagtggttgccggtggcggaggcccactacgacggtgccgacgagctgcccgagggctacaccctcatcaccgccacacaccccgacgaccccgacgaccccaccaacccccacaacacacccacacgcacccacacacaaaccacacgcgtcctcaccgccctccaacaccacctcatcaccaccaaccacaccctcatcgtccacaccaccaccgaccccccaggcgccgccgtcaccggcctcacccgcaccgcacaaaacgaacaccccggccgcatccacctcatcgaaacccaccacccccacaccccactccccctcacccaactcaccaccctccaccaaccccacctacgcctcaccaacaacaccctccacaccccccacctcacccccatcaccacccaccacaacaccaccacaaccacccccaacaccccacccctcaaccccaaccacgccatcctcatcaccggcggctccggcaccctcgccggcatcctcgcccgccacctcaaccacccccacacctacctcctctcccgcacaccaccaccccccaccacacccggcacccacatcccctgcgacctcaccgaccccacccaaatcacccaagccctcacccacataccacaacccctcaccggcatcttccacaccgccgccaccctcgacgacgccaccctcaccaacctcaccccccaacacctcaccaccaccctccaacccaaagccgacgccgcctggcacctccaccaccacacccaaaaccaacccctcacccacttcgtcctctactccagcgccgccgccaccctcggcagccccggccaagccaactacgccgccgccaacgccttcctcgacgccctcgccacccaccgccacacccaaggacaacccgccaccaccatcgcctggggcatgtggcacaccaccaccacactcaccagccaactcaccgacagcgaccgcgaccgcatccgccgcggcggcttcctgccgatctcggacgacgagggcatgc

SEQ ID NO: 29 - protein, 1588 aa, Artificial Sequence
  Description of Artificial Sequence: Synthetic PKS synthase fragment
MRLYEAARRTGSPVVVAAALDDAPDVPLLRGLRRTTVRRAAVRERSLADRSPCCPTTSAPTPPSRSSWNSTATVLGHLGAEDIPATTTFKELGIDSLTAVQLRNALTTATGVRLNATAVFDFPTPRALAARLGDELAGTRAPVAARTAATAAAHDEPLAIVGMACRLPGGVASPQELWRLVASGTDAITEFPADRGWDVDALYDPDPDAIGKTFVRHGGFLDGATGFDAAFFGISPREALAMDPQQRVLLETSWEAFESAGITPDAARGSDTGVFIGAFSYGYGTGADTNGFGATGSQTSVLSGRLSYFYGLEGPSVTVDTACSSSLVALHQAGQSLRSGECSLALVGGVTVMASPGGFVEFSRQRGLAPDGRAKAFGAGADGTSFAEGAGALVVERLSDAERHGHTVLALVRGSAANSDGASNGLSAPNGPSQERVIHQALANAKLTPADVDAVEAHGTGTRLGDPIEAQALLATYGQDRATPLLLGSLKSNIGHAQAASGVAGIIKMVQAIRHGELPPTLHADEPSPHVDWTAGAVELLTSARPWPGTGRPRRAGVSSFGVSGTNAHVILESAPPAQPAEEAQPVETPVVASDVLPLVISAKTQPALTEHEDRLRAYLAASPGADIRAVASTLAVTRSVFEHRAVLLGDDTVTGTAVTDPRIVFVFPGQGWQWLGMGSALRDSSVVFAERMAECAAALREFVDWDLFTVLDDPAVVDRVDVVQPASWAMMVSLAAVWQAAGVRPDAVIGHSQGEIAAACVAGAVSLRDAARIVTLRSQAIARGLAGRGAMASVALPAQDVELVDGAWIAAHNGPASTVIAGTPEAVDHVLTAHEAQGVRVRRITVDYASHTPHVELIRDELLDITSDSSSQTPLVPWLSTVDGTWVDSPLDGEYWYRNLREPVGFHPAVSQLQAQGDTVFVEVSASPVLLQAMDDDVVTVATLRRDDGDATRMLTALAQAYVHGVTVDWPAILGTTTTRVLDLPTYAFQHQRYWLESAPPATADSGHPVLGTGVAVAGSPGRVFTGPVPAGADRAVFIAELALAAADATDCATVEQLDVTSVPGGSARGRATAQTWVDEPAADGRRRFTVHTRVGDAPWTLHAEGVLRPGRVPQPEAVDTAWPPPGAVPADGLPGAWRRADQVFVEAEVDSPDGFVAHPDLLDAVFSAVGDGSRQPTGWRDLAVHASDATVLRACLTRRDSGVVELAAFDGAGMPVLTAESVTLGEVASAGGSDESDGLLRLEWLPVAEAHYDGADELPEGYTLITATHPDDPDDPTNPHNTPTRTHTQTTRVLTALQHHLITTNHTLIVHTTTDPPGAAVTGLTRTAQNEHPGRIHLIETHHPHTPLPLTQLTTLHQPHLRLTNNTLHTPHLTPITTHHNTTTTTPNTPPLNPNHAILITGGSGTLAGILARHLNHPHTYLLSRTPPPPTTPGTHIPCDLTDPTQITQALTHIPQPLTGIFHTAATLDDATLTNLTPQHLTTTLQPKADAAWHLHHHTQNQPLTHFVLYSSAAATLGSPGQANYAAANAFLDALATHRHTQGQPATTIAWGMWHTTTTLTSQLTDSDRDRIRRGGFLPISDDEGM

SEQ ID NO: 30 - DNA, 4737 bp, Artificial Sequence
  Description of Artificial Sequence: DNA encoding synthetic PKS synthase fragment
  CDS (3)..(4736)
gcatgcggctgtacgaggcggcacggcgcaccggaagtcccgtggtggtggcggccgcgctcgacgacgcgccggacgtgccgctgctgcgcgggctgcggcgtacgaccgtccggcgtgccgccgtccgggaacgctctctcgccgaccgctcgccgtgctgcccgacgacgagcgcgccgacgcctccctcgcgttcgtcctggaacagcaccgccaccgtgctcggccacctgggcgccgaagacatcccggcgacgacgacgttcaaggaactcggcatcgactcgctcaccgcggtccagctgcgcaacgcgctgaccacggcgaccggcgtacgcctcaacgccacagcggtcttcgactttccgacgccgcgcgcgctcgccgcgagactcggcgacgagctggccggtacccgcgcgcccgtcgcggcccggaccgcggccaccgcggccgcgcacgacgaaccgctggcgatcgtgggcatggcctgccgtctgccgggcggggtcgcgtcgccacaggagctgtggcgtctcgtcgcgtccggcaccgacgccatcacggagttccccgcggaccgcggctgggacgtggacgcgctctacgacccggaccccgacgcgatcggcaagaccttcgtccggcacggcggcttcctcgacggtgcgaccggcttcgacgcggcgttcttcgggatcagcccgcgcgaggccctggccatggacccgcagcaacgggtgctcctggagacgtcctgggaggcgttcgaaagcgcgggcatcaccccggacgcggcgcggggcagcgacaccggcgtgttcatcggcgcgttctcctacgggtacggcacgggtgcggataccaacggcttcggcgcgacagggtcgcagaccagcgtgctctccggccgcctctcgtacttctacggtctggagggcccttcggtcacggtcgacaccgcctgctcgtcgtcactggtcgccctgcaccaggcagggcagtccctgcgctcgggcgaatgctcgctcgccctggtcggcggtgtcacggtgatggcgtcgcccggcggattcgtcgagttctcccggcagcgcgggctcgcgccggacgggcgggcgaaggcgttcggcgcgggcgcggacggtacgagcttcgccgagggcgccggtgccctggtggtcgagcggctctccgacgcggagcgccacggccacaccgtcctcgccctcgtacgcggctccgcggctaactccgacggcgcgtcgaacggtctgtcggcgccgaacggcccctcccaggaacgcgtcatccaccaggccctcgcgaacgcgaaactcacccccgccgatgtcgacgcggtcgaggcgcacggcaccggcacccgcctcggcgaccccatcgaggcgcaggcgctgctcgcgacgtacggacaggaccgggcgacgcccctgctgctcggctcgctgaagtcgaacatcgggcacgcccaggccgcgtcaggggtcgccgggatcatcaagatggtgcaggccatccggcacggggaactgccgccgacactgcacgcggacgagccgtcgccgcacgtcgactggacggccggtgccgtcgagctcctgacgtcggcccggccgtggccggggaccggtcgcccgcgccgcgctgccgtctcgtcgttcggcgtgagcggcacgaacgcccacatcatccttgaggcaggaccggtcaaaacgggaccggtcgaggcaggagcgatcgaggcaggaccggtcgaagtaggaccggtcgaggctggaccgctccccgcggcgccgccgtcagcaccgggcgaagaccttccgctgctcgtgtcggcgcgttccccggaggcactcgacgagcagatcgggcgcctgcgcgcctatctcgacaccggcccgggcgtcgaccgggcggccgtggcgcagacactggcccggcgtacgcacttcacccaccgggccgtactgctcggggacaccgtcatcggcgctccccccgcggaccaggccgacgaactcgtcttcgtctactccggtcagggcacccagcatcccgcgatgggcgagcagctagccgccgcgttccccgtcttcgcgcggatccatcagcaggtgtgggacctgctcgatgtgcccgatctggaggtgaacgagaccggttacgcccagccggccctgttcgcaatgcaggtggctctgttcgggctgctggaatcgtggggtgtacgaccggacgcggtgatcggccattcggtgggtgagcttgcggctgcgtatgtgtccggggtgtggtcgttggaggatgcctgcactttggtgtcggcgcgggctcgtctgatgcaggctctgcccgcgggtggggtgatggtcgctgtcccggtctcggaggatgaggcccgggccgtgctgggtgagggtgtggagatcgccgcggtcaacggcccgtcgtcggtggttctctccggtgatgaggccgccgtgctgcaggccgcggaggggctggggaagtggacgcggctggcgaccagccacgcgttccattccgcccgtatggaacccatgctggaggagttccgggcggtcgccgaaggcctgacctaccggacgccgcaggtctccatggccgttggtgatcaggtgaccaccgctgagtactgggtgcggcaggtccgggacacggtccggttcggcgagcaggtggcctcgtacgaggacgccgtgttcgtcgagctgggtgccgaccggtcactggcccgcctggtcgacggtgtcgcgatgctgcacggcgaccacgaaatccaggccgcgatcggcgccctggcccacctgtatgtcaacggcgtcacggtcgactggcccgcgctcctgggcgatgctccggcaacacgggtgctggaccttccgacatacgccttccagcaccagcgctactggctcgagtcggctcccccggccacggccgactcgggccaccccgtcctcggcaccggagtcgccgtcgccgggtcgccgggccgggtgttcacgggtcccgtgcccgccggtgcggaccgcgcggtgttcatcgccgaactggcgctcgccgccgccgacgccaccgactgcgccacggtcgaacagctcgacgtcacctccgtgcccggcggatccgcccgcggcagggccaccgcgcagacctgggtcgatgaacccgccgccgacgggcggcgccgcttcaccgtccacacccgcgtcggcgacgccccgtggacgctgcacgccgagggggttctccgccccggccgcgtgccccagcccgaagccgtcgacaccgcctggcccccgccgggcgcggtgcccgcggacgggctgcccggggcgtggcgacgcgcggaccaggtcttcgtcgaagccgaagtcgacagccctgacggcttcgtggcacaccccgacctgctcgacgcggtcttctccgcggtcggcgacgggagccgccagccgaccggatggcgcgacctcgcggtgcacgcgtcggacgccaccgtgctgcgcgcctgcctcacccgccgcgacagtggtgtcgtggagctcgccgccttcgacggtgccggaatgccggtgctcaccgcggagtcggtgacgctgggcgaggtcgcgtcggcaggcggatccgacgagtcggacggtctgcttcggcttgagtggttgccggtggcggaggcccactacgacggtgccgacgagctgcccgagggctacaccctcatcaccgccacacaccccgacgaccccgacgaccccaccaacccccacaacacacccacacgcacccacacacaaaccacacgcgtcctcaccgccctccaacaccacctcatcaccaccaaccacaccctcatcgtccacaccaccaccgaccccccaggcgccgccgtcaccggcctcacccgcaccgcacaaaacgaacaccccggccgcatccacctcatcgaaacccaccacccccacaccccactccccctcacccaactcaccaccctccaccaaccccacctacgcctcaccaacaacaccctccacaccccccacctcacccccatcaccacccaccacaacaccaccacaaccacccccaacaccccacccctcaaccccaaccacgccatcctcatcaccggcggctccggcaccctcgccggcatcctcgcccgccacctcaaccacccccacacctacctcctctcccgcacaccaccaccccccaccacacccggcacccacatcccctgcgacctcaccgaccccacccaaatcacccaagccctcacccacataccacaacccctcaccggcatcttccacaccgccgccaccctcgacgacgccaccctcaccaacctcaccccccaacacctcaccaccaccctccaacccaaagccgacgccgcctggcacctccaccaccacacccaaaaccaacccctcacccacttcgtcctctactccagcgccgccgccaccctcggcagccccggccaagccaactacgccgccgccaacgccttcctcgacgccctcgccacccaccgccacacccaaggacaacccgccaccaccatcgcctggggcatgtggcacaccaccaccacactcaccagccaactcaccgacagcgaccgcgaccgcatccgccgcggcggcttcctgccgatctcggacgacgagggcatgc

SEQ ID NO: 31 - protein, 1578 aa, Artificial Sequence
  Description of Artificial Sequence: Synthetic PKS synthase fragment
MRLYEAARRTGSPVVVAAALDDAPDVPLLRGLRRTTVRRAAVRERSLADRSPCCPTTSAPTPPSRSSWNSTATVLGHLGAEDIPATTTFKELGIDSLTAVQLRNALTTATGVRLNATAVFDFPTPRALAARLGDELAGTRAPVAARTAATAAAHDEPLAIVGMACRLPGGVASPQELWRLVASGTDAITEFPADRGWDVDALYDPDPDAIGKTFVRHGGFLDGATGFDAAFFGISPREALAMDPQQRVLLETSWEAFESAGITPDAARGSDTGVFIGAFSYGYGTGADTNGFGATGSQTSVLSGRLSYFYGLEGPSVTVDTACSSSLVALHQAGQSLRSGECSLALVGGVTVMASPGGFVEFSRQRGLAPDGRAKAFGAGADGTSFAEGAGALVVERLSDAERHGHTVLALVRGSAANSDGASNGLSAPNGPSQERVIHQALANAKLTPADVDAVEAHGTGTRLGDPIEAQALLATYGQDRATPLLLGSLKSNIGHAQAASGVAGIIKMVQAIRHGELPPTLHADEPSPHVDWTAGAVELLTSARPWPGTGRPRRAAVSSFGVSGTNAHIILEAGPVKTGPVEAGAIEAGPVEVGPVEAGPLPAAPPSAPGEDLPLLVSARSPEALDEQIGRLRAYLDTGPGVDRAAVAQTLARRTHFTHRAVLLGDTVIGAPPADQADELVFVYSGQGTQHPAMGEQLAAAFPVFARIHQQVWDLLDVPDLEVNETGYAQPALFAMQVALFGLLESWGVRPDAVIGHSVGELAAAYVSGVWSLEDACTLVSARARLMQALPAGGVMVAVPVSEDEARAVLGEGVEIAAVNGPSSVVLSGDEAAVLQAAEGLGKWTRLATSHAFHSARMEPMLEEFRAVAEGLTYRTPQVSMAVGDQVTTAEYWVRQVRDTVRFGEQVASYEDAVFVELGADRSLARLVDGVAMLHGDHEIQAAIGALAHLYVNGVTVDWPALLGDAPATRVLDLPTYAFQHQRYWLESAPPATADSGHPVLGTGVAVAGSPGRVFTGPVPAGADRAVFIAELALAAADATDCATVEQLDVTSVPGGSARGRATAQTWVDEPAADGRRRFTVHTRVGDAPWTLHAEGVLRPGRVPQPEAVDTAWPPPGAVPADGLPGAWRRADQVFVEAEVDSPDGFVAHPDLLDAVFSAVGDGSRQPTGWRDLAVHASDATVLRACLTRRDSGVVELAAFDGAGMPVLTAESVTLGEVASAGGSDESDGLLRLEWLPVAEAHYDGADELPEGYTLITATHPDDPDDPTNPHNTPTRTHTQTTRVLTALQHHLITTNHTLIVHTTTDPPGAAVTGLTRTAQNEHPGRIHLIETHHPHTPLPLTQLTTLHQPHLRLTNNTLHTPHLTPITTHHNTTTTTPNTPPLNPNHAILITGGSGTLAGILARHLNHPHTYLLSRTPPPPTTPGTHIPCDLTDPTQITQALTHIPQPLTGIFHTAATLDDATLTNLTPQHLTTTLQPKADAAWHLHHHTQNQPLTHFVLYSSAAATLGSPGQANYAAANAFLDALATHRHTQGQPATTIAWGMWHTTTTLTSQLTDSDRDRIRRGGFLPISDDEGM

SEQ ID NO: 32 - DNA, 4818 bp, Artificial Sequence
  Description of Artificial Sequence: DNA encoding synthetic PKS synthase fragment
  CDS (3)..(4817)
gcatgcggctgtacgaggcggcacggcgcaccggaagtcccgtggtggtggcggccgcgctcgacgacgcgccggacgtgccgctgctgcgcgggctgcggcgtacgaccgtccggcgtgccgccgtccgggaacgctctctcgccgaccgctcgccgtgctgcccgacgacgagcgcgccgacgcctccctcgcgttcgtcctggaacagcaccgccaccgtgctcggccacctgggcgccgaagacatcccggcgacgacgacgttcaaggaactcggcatcgactcgctcaccgcggtccagctgcgcaacgcgctgaccacggcgaccggcgtacgcctcaacgccacagcggtcttcgactttccgacgccgcgcgcgctcgccgcgagactcggcgacgagctggccggtacccgcgcgcccgtcgcggcccggaccgcggccaccgcggccgcgcacgacgaaccgctggcgatcgtgggcatggcctgccgtctgccgggcggggtcgcgtcgccacaggagctgtggcgtctcgtcgcgtccggcaccgacgccatcacggagttccccgcggaccgcggctgggacgtggacgcgctctacgacccggaccccgacgcgatcggcaagaccttcgtccggcacggcggcttcctcgacggtgcgaccggcttcgacgcggcgttcttcgggatcagcccgcgcgaggccctggccatggacccgcagcaacgggtgctcctggagacgtcctgggaggcgttcgaaagcgcgggcatcaccccggacgcggcgcggggcagcgacaccggcgtgttcatcggcgcgttctcctacgggtacggcacgggtgcggataccaacggcttcggcgcgacagggtcgcagaccagcgtgctctccggccgcctctcgtacttctacggtctggagggcccttcggtcacggtcgacaccgcctgctcgtcgtcactggtcgccctgcaccaggcagggcagtccctgcgctcgggcgaatgctcgctcgccctggtcggcggtgtcacggtgatggcgtcgcccggcggattcgtcgagttctcccggcagcgcgggctcgcgccggacgggcgggcgaaggcgttcggcgcgggcgcggacggtacgagcttcgccgagggcgccggtgccctggtggtcgagcggctctccgacgcggagcgccacggccacaccgtcctcgccctcgtacgcggctccgcggctaactccgacggcgcgtcgaacggtctgtcggcgccgaacggcccctcccaggaacgcgtcatccaccaggccctcgcgaacgcgaaactcacccccgccgatgtcgacgcggtcgaggcgcacggcaccggcacccgcctcggcgaccccatcgaggcgcaggcgctgctcgcgacgtacggacaggaccgggcgacgcccctgctgctcggctcgctgaagtcgaacatcgggcacgcccaggccgcgtcaggggtcgccgggatcatcaagatggtgcaggccatccggcacggggaactgccgccgacactgcacgcggacgagccgtcgccgcacgtcgactggacggccggtgccgtcgagctcctgacgtcggcccggccgtggccggggaccggtcgcccgcgccgcgctgccgtctcgtcgttcggcgtgagcggcacgaacgcccacatcatccttgaggcaggaccggtcaaaacgggaccggtcgaggcaggagcgatcgaggcaggaccggtcgaagtaggaccggtcgaggctggaccgctccccgcggcgccgccgtcagcaccgggcgaagaccttccgctgctcgtgtcggcgcgttccccggaggcactcgacgagcagatcgggcgcctgcgcgcctatctcgacaccggcccgggcgtcgaccgggcggccgtggcgcagacactggcccggcgtacgcacttcacccaccgggccgtactgctcggggacaccgtcatcggcgctccccccgcggaccaggccgacgaactcgtcttcgtctactccggtcagggcacccagcatcccgcgatgggcgagcagctagccgattcgtcggtggtgttcgccgagcggatggccgagtgtgcggcggcgttgcgcgagttcgtggactgggatctgttcacggttctggatgatccggcggtggtggaccgggttgatgtggtccagcccgcttcctgggcgatgatggtttccctggccgcggtgtggcaggcggccggtgtgcggccggatgcggtgatcggccattcgcagggtgagatcgccgcagcttgtgtggcgggtgcggtgtcactacgcgatgccgcccggatcgtgaccttgcgcagccaggcgatcgcccggggcctggcgggccggggcgcgatggcatccgtcgccctgcccgcgcaggatgtcgagctggtcgacggggcctggatcgccgcccacaacgggcccgcctccaccgtgatcgcgggcaccccggaagcggtcgaccatgtcctcaccgctcatgaggcacaaggggtgcgggtgcggcggatcaccgtcgactatgcctcgcacaccccgcacgtcgagctgatccgcgacgaactactcgacatcactagcgacagcagctcgcagaccccgctcgtgccgtggctgtcgaccgtggacggcacctgggtcgacagcccgctggacggggagtactggtaccggaacctgcgtgaaccggtcggtttccaccccgccgtcagccagttgcaggcccagggcgacaccgtgttcgtcgaggtcagcgccagcccggtgttgttgcaggcgatggacgacgatgtcgtcacggttgccacgctgcgtcgtgacgacggcgacgccacccggatgctcaccgccctggcacaggcctatgtccacggcgtcaccgtcgactggcccgccatcctcggcaccaccacaacccgggtactggaccttccgacctacgccttccaacaccagcggtactggctcgagtcggctcccccggccacggccgactcgggccaccccgtcctcggcaccggagtcgccgtcgccgggtcgccgggccgggtgttcacgggtcccgtgcccgccggtgcggaccgcgcggtgttcatcgccgaactggcgctcgccgccgccgacgccaccgactgcgccacggtcgaacagctcgacgtcacctccgtgcccggcggatccgcccgcggcagggccaccgcgcagacctgggtcgatgaacccgccgccgacgggcggcgccgcttcaccgtccacacccgcgtcggcgacgccccgtggacgctgcacgccgagggggttctccgccccggccgcgtgccccagcccgaagccgtcgacaccgcctggcccccgccgggcgcggtgcccgcggacgggctgcccggggcgtggcgacgcgcggaccaggtcttcgtcgaagccgaagtcgacagccctgacggcttcgtggcacaccccgacctgctcgacgcggtcttctccgcggtcggcgacgggagccgccagccgaccggatggcgcgacctcgcggtgcacgcgtcggacgccaccgtgctgcgcgcctgcctcacccgccgcgacagtggtgtcgtggagctcgccgccttcgacggtgccggaatgccggtgctcaccgcggagtcggtgacgctgggcgaggtcgcgtcggcaggcggatccgacgagtcggacggtctgcttcggcttgagtggttgccggtggcggaggcccactacgacggtgccgacgagctgcccgagggctacaccctcatcaccgccacacaccccgacgaccccgacgaccccaccaacccccacaacacacccacacgcacccacacacaaaccacacgcgtcctcaccgccctccaacaccacctcatcaccaccaaccacaccctcatcgtccacaccaccaccgaccccccaggcgccgccgtcaccggcctcacccgcaccgcacaaaacgaacaccccggccgcatccacctcatcgaaacccaccacccccacaccccactccccctcacccaactcaccaccctccaccaaccccacctacgcctcaccaacaacaccctccacaccccccacctcacccccatcaccacccaccacaacaccaccacaaccacccccaacaccccacccctcaaccccaaccacgccatcctcatcaccggcggctccggcaccctcgccggcatcctcgcccgccacctcaaccacccccacacctacctcctctcccgcacaccaccaccccccaccacacccggcacccacatcccctgcgacctcaccgaccccacccaaatcacccaagccctcacccacataccacaacccctcaccggcatcttccacaccgccgccaccctcgacgacgccaccctcaccaacctcaccccccaacacctcaccaccaccctccaacccaaagccgacgccgcctggcacctccaccaccacacccaaaaccaacccctcacccacttcgtcctctactccagcgccgccgccaccctcggcagccccggccaagccaactacgccgccgccaacgccttcctcgacgccctcgccacccaccgccacacccaaggacaacccgccaccaccatcgcctggggcatgtggcacaccaccaccacactcaccagccaactcaccgacagcgaccgcgaccgcatccgccgcggcggcttcctgccgatctcggacgacgagggcatgc

SEQ ID NO: 33 - protein, 1605 aa, Artificial Sequence
  Description of Artificial Sequence: Synthetic PKS synthase fragment
MRLYEAARRTGSPVVVAAALDDAPDVPLLRGLRRTTVRRAAVRERSLADRSPCCPTTSAPTPPSRSSWNSTATVLGHLGAEDIPATTTFKELGIDSLTAVQLRNALTTATGVRLNATAVFDFPTPRALAARLGDELAGTRAPVAARTAATAAAHDEPLAIVGMACRLPGGVASPQELWRLVASGTDAITEFPADRGWDVDALYDPDPDAIGKTFVRHGGFLDGATGFDAAFFGISPREALAMDPQQRVLLETSWEAFESAGITPDAARGSDTGVFIGAFSYGYGTGADTNGFGATGSQTSVLSGRLSYFYGLEGPSVTVDTACSSSLVALHQAGQSLRSGECSLALVGGVTVMASPGGFVEFSRQRGLAPDGRAKAFGAGADGTSFAEGAGALVVERLSDAERHGHTVLALVRGSAANSDGASNGLSAPNGPSQERVIHQALANAKLTPADVDAVEAHGTGTRLGDPIEAQALLATYGQDRATPLLLGSLKSNIGHAQAASGVAGIIKMVQAIRHGELPPTLHADEPSPHVDWTAGAVELLTSARPWPGTGRPRRAAVSSFGVSGTNAHIILEAGPVKTGPVEAGAIEAGPVEVGPVEAGPLPAAPPSAPGEDLPLLVSARSPEALDEQIGRLRAYLDTGPGVDRAAVAQTLARRTHFTHRAVLLGDTVIGAPPADQADELVFVYSGQGTQHPAMGEQLADSSVVFAERMAECAAALREFVDWDLFTVLDDPAVVDRVDVVQPASWAMMVSLAAVWQAAGVRPDAVIGHSQGEIAAACVAGAVSLRDAARIVTLRSQAIARGLAGRGAMASVALPAQDVELVDGAWIAAHNGPASTVIAGTPEAVDHVLTAHEAQGVRVRRITVDYASHTPHVELIRDELLDITSDSSSQTPLVPWLSTVDGTWVDSPLDGEYWYRNLREPVGFHPAVSQLQAQGDTVFVEVSASPVLLQAMDDDVVTVATLRRDDGDATRMLTALAQAYVHGVTVDWPAILGTTTTRVLDLPTYAFQHQRYWLESAPPATADSGHPVLGTGVAVAGSPGRVFTGPVPAGADRAVFIAELALAAADATDCATVEQLDVTSVPGGSARGRATAQTWVDEPAADGRRRFTVHTRVGDAPWTLHAEGVLRPGRVPQPEAVDTAWPPPGAVPADGLPGAWRRADQVFVEAEVDSPDGFVAHPDLLDAVFSAVGDGSRQPTGWRDLAVHASDATVLRACLTRRDSGVVELAAFDGAGMPVLTAESVTLGEVASAGGSDESDGLLRLEWLPVAEAHYDGADELPEGYTLITATHPDDPDDPTNPHNTPTRTHTQTTRVLTALQHHLITTNHTLIVHTTTDPPGAAVTGLTRTAQNEHPGRIHLIETHHPHTPLPLTQLTTLHQPHLRLTNNTLHTPHLTPITTHHNTTTTTPNTPPLNPNHAILITGGSGTLAGILARHLNHPHTYLLSRTPPPPTTPGTHIPCDLTDPTQITQALTHIPQPLTGIFHTAATLDDATLTNLTPQHLTTTLQPKADAAWHLHHHTQNQPLTHFVLYSSAAATLGSPGQANYAAANAFLDALATHRHTQGQPATTIAWGMWHTTTTLTSQLTDSDRDRIRRGGFLPISDDEGM

SEQ ID NO: 34 - DNA, 33 bp, Artificial Sequence
  Description of Artificial Sequence: DNA encoding synthetic PKS synthase fragment
  CDS (1)..(33)
ggccgtccgcgccgtgcggcggtctcgtcgttc

SEQ ID NO: 35 - protein, 11 aa, Artificial Sequence
  Description of Artificial Sequence: Synthetic PKS synthase fragment
GRPRRAAVSSF

SEQ ID NO: 36 - DNA, 33 bp, Artificial Sequence
  Description of Artificial Sequence: DNA encoding synthetic PKS synthase fragment
  CDS (1)..(33)
acccagcatcccgcgatgggtgagcggctcgcc

SEQ ID NO: 37 - protein, 11 aa, Artificial Sequence
  Description of Artificial Sequence: Synthetic PKS synthase fragment
TQHPAMGERLA

SEQ ID NO: 38 - DNA, 33 bp, Artificial Sequence
  Description of Artificial Sequence: DNA encoding synthetic PKS synthase fragment
  CDS (1)..(33)
tacgccttccagcggcggccctactggatcgag

SEQ ID NO: 39 - protein, 11 aa, Artificial Sequence
  Description of Artificial Sequence: Synthetic PKS synthase fragment
YAFQRRPYWIE

SEQ ID NO: 40 - DNA, 33 bp, Artificial Sequence
  Description of Artificial Sequence: DNA encoding synthetic PKS synthase fragment
  CDS (1)..(33)
gaccggccccgtcgggcgggcgtgtcgtccttc

SEQ ID NO: 41 - protein, 11 aa, Artificial Sequence
  Description of Artificial Sequence: Synthetic PKS synthase fragment
DRPRRAGVSSF

SEQ ID NO: 42 - DNA, 33 bp, Artificial Sequence
  Description of Artificial Sequence: DNA encoding synthetic PKS synthase fragment
  CDS (1)..(33)
tggcagtggctggggatgggcagtgccctgcgg

SEQ ID NO: 43 - protein, 11 aa, Artificial Sequence
  Description of Artificial Sequence: Synthetic PKS synthase fragment
WQWLGMGSALR

SEQ ID NO: 44 - DNA, 33 bp, Artificial Sequence
  Description of Artificial Sequence: DNA encoding synthetic PKS synthase fragment
  CDS (1)..(33)
tacgccttccaacaccagcggtactgggtcgag

SEQ ID NO: 45 - protein, 11 aa, Artificial Sequence
  Description of Artificial Sequence: Synthetic PKS synthase fragment
YAFQHQRYWVE

SEQ ID NO: 46 - DNA, 33 bp, Artificial Sequence
  Description of Artificial Sequence: DNA encoding synthetic PKS synthase fragment
  CDS (1)..(33)
ggccgagcgcgccgggcaggcgtgtcgtccttc

SEQ ID NO: 47 - protein, 11 aa, Artificial Sequence
  Description of Artificial Sequence: Synthetic PKS synthase fragment
GRARRAGVSSF

SEQ ID NO: 48 - DNA, 33 bp, Artificial Sequence
  Description of Artificial Sequence: DNA encoding synthetic PKS synthase fragment
  CDS (1)..(33)
tcgcagcgtgctggcatgggtgaggaactggcc

SEQ ID NO: 49 - protein, 11 aa, Artificial Sequence
  Description of Artificial Sequence: Synthetic PKS synthase fragment
SQRAGMGEELA

SEQ ID NO: 50 - DNA, 33 bp, Artificial Sequence
  Description of Artificial Sequence: DNA encoding synthetic PKS synthase fragment
  CDS (1)..(33)
tacgccttccagcaccagcgctactggctcgag

SEQ ID NO: 51 - protein, 11 aa, Artificial Sequence
  Description of Artificial Sequence: Synthetic PKS synthase fragment
YAFQHQRYWLE

SEQ ID NO: 52 - DNA, 33 bp, Artificial Sequence
  Description of Artificial Sequence: DNA encoding synthetic PKS synthase fragment
  CDS (1)..(33)
gcgcgaccgcgccgggcgggggtctcgtcgttc

SEQ ID NO: 53 - protein, 11 aa, Artificial Sequence
  Description of Artificial Sequence: Synthetic PKS synthase fragment
ARPRRAGVSSF

SEQ ID NO: 54 - DNA, 33 bp, Artificial Sequence
  Description of Artificial Sequence: DNA encoding synthetic PKS synthase fragment
  CDS (1)..(33)
tggcagtgggcgggcatggccgtcgacctgctc

SEQ ID NO: 55 - protein, 11 aa, Artificial Sequence
  Description of Artificial Sequence: Synthetic PKS synthase fragment
WQWAGMAVDLL

SEQ ID NO: 56 - DNA, 33 bp, Artificial Sequence
  Description of Artificial Sequence: DNA encoding synthetic PKS synthase fragment
  CDS (1)..(33)
tacccgttccagcgcgagcgcgtctggctcgaa

SEQ ID NO: 57 - protein, 11 aa, Artificial Sequence
  Description of Artificial Sequence: Synthetic PKS synthase fragment
YPFQRERVWLE

SEQ ID NO: 58 - DNA, 33 bp, Artificial Sequence
  Description of Artificial Sequence: DNA encoding synthetic PKS synthase fragment
  CDS (1)..(33)
gacggggtgcgccgggcaggtgtgtcggcgttc

SEQ ID NO: 59 - protein, 11 aa, Artificial Sequence
  Description of Artificial Sequence: Synthetic PKS synthase fragment
DGVRRAGVSAF

SEQ ID NO: 60 - DNA, 33 bp, Artificial Sequence
  Description of Artificial Sequence: DNA encoding synthetic PKS synthase fragment
  CDS (1)..(33)
gcccagtgggaaggcatggcgcgggagttgttg

SEQ ID NO: 61 - protein, 11 aa, Artificial Sequence
  Description of Artificial Sequence: Synthetic PKS synthase fragment
AQWEGMARELL

SEQ ID NO: 62 - DNA, 33 bp, Artificial Sequence
  Description of Artificial Sequence: DNA encoding synthetic PKS synthase fragment
  CDS (1)..(33)
tatcctttccagggcaagcggttctggctgctg

SEQ ID NO: 63 - protein, 11 aa, Artificial Sequence
  Description of Artificial Sequence: Synthetic PKS synthase fragment
YPFQGKRFWLL

SEQ ID NO: 64 - DNA, 480 bp, Artificial Sequence
  Description of Artificial Sequence: DNA encoding synthetic PKS synthase fragment
  CDS (3)..(479)
ccggcgccgtcgaactgctgacgtcggcccggccgtggcccgagaccgaccggccacggcgtgccgccgtctcctcgttcggggtgagcggcaccaacgcccacgtcatcctggaggccggaccggtaacggagacgcccgcggcatcgccttccggtgaccttcccctgctggtgtcggcacgctcaccggaagcgctcgacgagcagatccgccgactgcgcgcctacctggacaccaccccggacgtcgaccgggtggccgtggcacagacgctggcccggcgcacacacttcgcccaccgcgccgtgctgctcggtgacaccgtcatcaccacaccccccgcggaccggcccgacgaactcgtcttcgtctactccggccagggcacccagcatcccgcgatgggcgagcagctcgccgccgcccatcccgtgttcgccgacgcctggcatgaagcgctccgccgccttgacaacc

SEQ ID NO: 65 - protein, 159 aa, Artificial Sequence
  Description of Artificial Sequence: Synthetic PKS synthase fragment
GAVELLTSARPWPETDRPRRAAVSSFGVSGTNAHVILEAGPVTETPAASPSGDLPLLVSARSPEALDEQIRRLRAYLDTTPDVDRVAVAQTLARRTHFAHRAVLLGDTVITTPPADRPDELVFVYSGQGTQHPAMGEQLAAAHPVFADAWHEALRRLDN

SEQ ID NO: 66 - DNA, 120 bp, Artificial Sequence
  Description of Artificial Sequence: DNA encoding synthetic PKS synthase fragment
  CDS (3)..(119)
tcctcggggctgggtcacggcacgacgcggatgtgcccgcgtacgcgttccaacggcggcactactggatcgagtcggcacgcccggccgcatccgacgcgggccaccccgtgctgggct

SEQ ID NO: 67 - protein, 39 aa, Artificial Sequence
  Description of Artificial Sequence: Synthetic PKS synthase fragment
LGAGSRHDADVPAYAFQRRHYWIESARPAASDAGHPVLG

SEQ ID NO: 68 - DNA, 480 bp, Artificial Sequence
  Description of Artificial Sequence: DNA encoding synthetic PKS synthase fragment
  CDS (1)..(480)
tcggccaggccgtggccgcggaccggccgtccgcgccgtgcggcggtctcgtcgttcggggtgagcggcaccaacgcccacatcatcctggaggccggacccgaccaggaggagccgtcggcagaaccggccggtgacctcccgctgctcgtgtcggcacggtccccggaggcactggacgagcagatcgggcgcctgcgcgactatctcgacgccgcccccggcgtggacctggcggccgtggcgcggacactggccacgcgtacgcacttctcccaccgcgccgtactgctcggtgacaccgtcatcaccgctccccccgtggaacagccgggcgagctcgtcttcgtctactcgggacagggcacccagcatcccgcgatgggtgagcggctcgccgcagccttccccgtgttcgccgacccggacgtacccgcctacgccttccagcggcggccctactggatcgagtccgcgccg

SEQ ID NO: 69 - protein, 160 aa, Artificial Sequence
  Description of Artificial Sequence: Synthetic PKS synthase fragment
SARPWPRTGRPRRAAVSSFGVSGTNAHIILEAGPDQEEPSAEPAGDLPLLVSARSPEALDEQIGRLRDYLDAAPGVDLAAVARTLATRTHFSHRAVLLGDTVITAPPVEQPGELVFVYSGQGTQHPAMGERLAAAFPVFADPDVPAYAFQRRPYWIESAP

SEQ ID NO: 70 - DNA, 60 bp, Artificial Sequence
  Description of Artificial Sequence: DNA encoding synthetic PKS synthase fragment
  CDS (1)..(60)
gacccggacgtacccgcctacgccttccagcggcggccctactggatcgagtccgcgccg

SEQ ID NO: 71 - protein, 20 aa, Artificial Sequence
  Description of Artificial Sequence: Synthetic PKS synthase fragment
DPDVPAYAFQRRPYWIESAP

SEQ ID NO: 72 - protein, 6396 aa, Streptomyces hygroscopicus
MPEQDKTVEYLRWATAELQKTRAELAAHSEPLAIVGMACRLPGGVASPEDLWQLLESGGDGITAFPTDRGWETTADGRGGFLTGAAGFDAAFFGISPREALAMDPQQRLALETSWEAFEHAGIDPQTLRGSDTGVFLGAFFQGYGIGADFDGYGTTSIHTSVLSGRLAYFYGLEGPAVTVDTACSSSLVALHQAGQSLRSGECSLALVGGVTVMASPAGFADFSEQGGLAPDARCKAFAEAADGTGFAEGSGVLIVEKLSDAERNGHRVLAVVRGSAVNQDGASNGLSAPNGPSQERVIRQALANAGLTPADVDAVEAHGTGTRLGDPIEAQAVLATYGQGRDTPVLLGSLKSNIGHTQAAAGVAGVIKMVLAMRHGTLPRTLHVDTPSSHVDWTAGAVELLTDARPWPETDRPRRAGVSSFGVSGTNAHIILESHPRPAPEPAPAPDTGPLPLLLSARTPQALDAQVHRLRAFLDDNPGADRVAVAQTLARRTQFEHRAVLLGDTLITVSPNAGRGPVVFVYSGQSTLHPHTGRQLASTYPVFAEAWREALDHLDPTQGPATHFAHQTALTALLRSWGITPHAVIGHSLGEITAAHAAGVLSLRDAGALLTTRTRLMDQLPSGGAMVTVLTSEEKARQVLRPGVEIAAVNGPHSLVLSGDEEAVLEAARQLGIHHRLPTRHAGHSERMQPLVAPLLDVARTLTYHQPHTAIPGDPTTAEYWAHQVRDQVRFQAHTEQYPGATFLEIGPNQDLSPLVDGVAAQTGTPDEVRALHTALAQLHVRGVAIDWTLVLGGDRAPVTLPTYPFQHKDYWLRPTSRADVTGAGQEQVAHPLLGAAVALPGTGGVVLTGRLSLASHPWLGEHAVDGTVLLPGAAFLELAARAGDEVGCDLLHELVIETPLVLPATGGVAVSVEIAEPDDTGRRAVTVHARADGSGLWTRHAGGFLGTAPAPATATDPAPWPPAEAGPVDVADVYDRFEDIGYSYGPGFRGLRAAWRAGDTVYAEVALPDEQSADAARFTLHPALLDAAFQAGALAALDAPGGAARLPFSFQDVRIHAAGATRLRVTVGRDGERSTVRMTGPDGQLVAVVGAVLSRPYAEGSGDGLLRPVWTELPMPVPSADDPRVEVLGADPGDGDVPAATRELTARVLGALQRHLSAAEDTTLVVRTGTGPAAAAAAGLVRSAQAENPGRVVLVEASPDTSVELLAACAALDEPQLAVRDGVLFAPRLVRMSDPAHGPLSLPDGDWLLTRSASGTLHDVALIADDTPRRALEAGEVRIDVRAAGLNFRDVLIALGTYTGATAMGGEAAGVVVETGPGVDDLSPGDRVFGLTRGGIGPTAVTDRRWLARIPDGWSFTTAASVPIVFATAWYGLVDLGTLRAGEKVLVHAATGGVGMAAAQIARHLGAELYATASTGKQHVLRAAGLPDTHIADSRTTAFRTAFPRMDVVLNALTGEFIDASLDLLDADGRFVEMGRTELRDPAAIVPAYLPFDLLDAGADRIGEILGELLRLFDAGALEPLPVRAWDVRQARDALGWMSRARHIGKNVLTLPRPLDPEGAVVLTGGSGTLAGILARHLRERHVYLLSRTAPPEGTPGVHLPCDVGDRDQLAAALERVDRPITAVVHLAGALDDGTVASLTPERFDTVLRPKADGAWYLHELTKEQDLAAFVLYSSAAGVLGNAGQGNYVAANAFLDALAELRHGSGLPALSIAWGLWEDVSGLTAALGEADRDRMRRSGFRAITAQQGMHLYEAAGRTGSPVVVAAALDDAPDVPLLRGLRRTTVRRAAVRECSSADRLAALTGDELAEALLTLVRESTAAVLGHVGGEDIPATAAFKDLGIDSLTAVQLRNALTEATGVRLNATAVFDFPTPHVLAGKLGDELTGTRAPVVPRTAATAGAHDEPLAIVGMACRLPGGVASPEELWHLVASGTDAITEFPTDRGWDVDAIYDPDPDAIGKTFVRHGGFLTGATGFDAAFFGISPREALAMDPQQRVLLETSWEAFESAGITPDSTRGSDTGVFVGAFSYGYGTGADTDGFGATGSQTSVLSGRLSYFYGLEGPAVTVDTACSSSLVALHQAGQSLRSGECSLALVGGVTVMASPGGFVEFSRQRGLAPDGRAKAFGAGADGTSFAEGAGVLIVERLSDAERNGHTVLAVVRGSAVNQDGASNGLSAPNGPSQERVIRQALANAGLTPADVDAVEAHGTGTRLGDPIEAQAVLATYGQERATPLLLGSLKSNIGHAQAASGVAGIIKMVQALRHGELPPTLHADEPSPHVDWTAGAVELLTSARPWPETDRPRRAAVSSFGVSGTNAHVILEAGPVTETPAASPSGDLPLLVSARSPEALDEQIRRLRAYLDTTPDVDRVAVAQTLARRTHFAHRAVLLGDTVITTPPADRPDELVFVYSGQGTQHPAMGEQLAAAHPVFADAWHEALRRLDNPDPHDPTHSQHVLFAHQAAFTALLRSWGITPHAVIGHSLGEITAAHAAGILSLDDACTLITTRARLMHTLPPPGAMVTVLTSEEKARQALRPGVEIAAVNGPHSIVLSGDEDAVLTVAGQLGIHHRLPAPHAGHSAHMEPVAAELLATTRGLRYHPPHTSIPNDPTTAEYWAEQVRKPVLFHAHAQQYPDAVFVEIGPAQDLSPLVDGIPLQNGTADEVHALHTALAHLYARGATLDWPRILGAGSRHDADVPAYAFQRRHYWIESARPAASDAGHPVLGSGIALAGSPGRVFTGSVPTGADRAVFVAELALAAADAVDCATVERLDIASVPGRPGHGRTTVQTWVDEPADDGRRRFTVHTRTGDAPWTLHAEGVLRPHGTALPDAADAEWPPPGAVPADGLPGVWRRGDQVFAEAEVDGPDGFVVHPDLLDAVFSAVGDGSRQPAGWRDLTVHASDATVLRACLTRRTDGAMGFAAFDGAGLPVLTAEAVTLREVASPSGSEESDGLHRLEWLAVAEAVYDGDLPEGHVLITAAHPDDPEDIPTRAHTRATRVLTALQHHLTTTDHTLIVHTTTDPAGATVTGLTRTAQNEHPHRIRLIETDHPHTPLPLAQLATLDHPHLRLTHHTLHHPHLTPLHTTTPPTTTPLNPEHAIIITGGSGTLAGILARHLNHPHTYLLSRTPPPDATPGTHLPCDVGDPHQLATTLTHIPQPLTAIFHTAATLDDGILHALTPDRLTTVLHPKANAAWHLHHLTQNQPLTHFVLYSSAAAVLGSPGQGNYAAANAFLDALATHRHTLGQPATSIAWGMWHTTSTLTGQLDDADRDRIRRGGFLPITDDEGMRLYEAAVGSGEDFVMAAAMDPAQPMTGSVPPILSGLRRSARRVARAGQTFAQRLAELPDADRGAALTTLVSDATAAVLGHADASEIAPTTTFKDLGIDSLTAIELRNRLAEATGLRLSATLVFDHPTPRVLAAKLRTDLFGTAVPTPARTARTHHDEPLAIVGMACRLPGGVASPEDLWQLVASGTDAITEFPTDRGWDIDRLFDPDPDAPGKTYVRHGGFLAEAAGFDAAFFGISPREARAMDPQQRVILETSWEAFENAGIVPDTLRGSDTGVFMGAFSHGYGAGVDLGGFGATATQNSVLSGRLSYFFGMEGPAVTVDTACSSSLVALHQAAQALRTGECSLALAGGVTVMPTPLGYVEFCRQRGLAPDGRCQAFAEGADGTSFSEGAGVLVLERLSDAERNGHTVLAVVRSSAVNQDGASNGISAPNGPSQQRVIRQALDKAGLAPADVDVVEAHGTGTPLGDPIEAQAIIATYGQDRDTPLYLGSVKSNIGHTQTTAGVAGVIKMVMAMRHGIAPKTLHVDEPSSHVDWTEGAVELLTEARPWPDAGRPRRAGVSSLGISGTNAHVILEGVPGPSRVEPSVDGLVPLPVSARSEASLRGQVERLEGYLRGSVDVAAVAQGLVRERAVFGHRAVLLGDARVMGVAVDQPRTVFVFPGQGAQWVGMGVELMDRSAVFAARMEECARALLPHTGWDVREMLARPDVAERVEVVQPASWAVAVSLAALWQAHGVVPDAVIGHSQGEIAAACVAGALSLEDAARVVALRSQVIAARLAGRGAMASVALPAGEVGLVEGVWIAARNGPASTVVAGEPSAVEDVVTRYETEGVRVRRIAVDYASHTPHVEAIEDELAEVLKGVAGKAASVAWWSTVDSAWVTEPVDESYWYRNLRRPVALDAAVAELDGSVFVECSAHPVLLPAMEQAHTVASLRTGDGGWERWLTALAQAWTLGAAVDWDTVVEPVPGRLLDLPTYAFERRRYWLEAAGATDLSAAGLTGAAHPMLAAITALPADDGGVVLTGRISLRTHPWLADHAVRGTVLLPGTAFVELVIRAGDETGCGIVDELVIESPLVVPATAAVDLSVTVEGADEAGRRRVTVHARTEGTGSWTRHASGTLTPDTPDTPNASGVVGAEPFSQWPPATAAAVDTSEFYLRLDALGYRFGPMFRGMRAAWRDGDTVYAEVALPEDRAADADGFGMHPALLDAALQSGSLLMLESDGEQSVQLPFSWHGVRFHATGATMLRVAVVPGPDGLRLHAADSGNRPVATIDALVTRSPEADLAPADPMLRVGWAPVPVPAGAGPSDADVLTLRGDDADPLGETRDLTTRVLDALLRADRPVIFQVTGGLAAKAAAGLVRTAQNEQPGRFFLVETDPGEVLDGAKRDAIAALGEPHVRLRDGLFEAARLMRATPSLTLPDTGSWQLRPSATGSLDDLAVVPTDAPDRPLAAGEVRIAVRAAGLNFRDVTVALGVVADARPLGSEAAGVVLETGPGVHDLAPGDRVLGMLAGAFGPVAITDRRLLGRMPDGWTFPQAASVMTAFATAWYGLVDLAGLRPGEKVLIHAAATGVGAAAVQIARHLGAEVYATTSAAKRHLVDLDGAHLADSRSTAFADAFPPVDVVLNSLTGEFLDASVGLLAAGGRFIEMGKTDIRHAVQQPFDLMDAGPDRMQRIIVELLGLFARDVLHPLPVHAWDVRQAREAFGWMSSGRHTGKLVLTVPRPLDPEGAVVITGGSGTLAGILARHLGHPHTYLLSRTPPPDTTPGTHLPCDVGDPHQLATTLARIPQPLTAVFHTAGTLDDALLDNLTPDRVDTVLKPKADAAWHLHRLTRDTDLAAFVVYSAVAGLMGSPGQGNYVAANAFLDALAEHRRAQGLPAQSLAWGMWADVSALTAKLTDADRQRIRRSGFPPLSAADGMRLFDAATRTPEPVVVATTVDLTQLDGAVAPLLRGLAAHRAGPARTVARNAGEEPLAVRLAGRTAAEQRRIMQEVVLRHAAAVLAYGLGDRVAADRPFRELGFDSLTAVDLRNRLAAETGLRLPTTLVFSHPTAEALTAHLLDLIDAPTARIAGESLPAVTAAPVAAARDQDEPIAIVAMACRLPGGVTSPEDLWRLVESGTDAITTPPDDRGWDVDALYDADPDAAGKAYNLRGGYLAGAAEFDAAFFDISPREALGMDPQQRLLLETAWEAIERGRISPASLRGREVGVYVGAAAQGYGLGAEDTEGHAITGGSTSLLSGRLAYVLGLEGPAVTVDTACSSSLVALHLACQGLRLGECELALAGGVSVLSSPAAFVEFSRQRGLAADGRCKSFGAGADGTTWSEGVGVLVLERLSDAERLGHTVLAVVRGSAVTSDGASNGLTAPNGLSQQRVIRKALAAAGLTGADVDVVEGHGTGTRLGDPVEADALLATYGQDRPAPVWLGSLKSNIGHATAAAGVAGVIKMVQAIGAGTMPRTLHVEEPSPAVDWSTGQVSLLGSNRPWPDDERPRRAAVSAFGLSGTNAHVILEQHRPAPVASQPPRPPREESQPLPWVLSARTPAALRAQAARLRDHLAAAPDADPLDIGYALATSRAQFAHRAAVVATTPDGFRAALDGLADGAEAPGVVTGTAQERRVAFLFDGQGAQRAGMGRELHRRFPVFAAAWDEVSDAFGKHLKHSPTDVYHGEHGALAHDTLYAQAGLFTLEVALLRLLEHWGVRPDVLVGHSVGEVTAAYAAGVLTLADATELIVARGRALRALPPGAMLAVDGSPAEVGARTDLDIAAVNGPSAVVLAGSPDDVAAFEREWSAAGRRTKRLDVGHAFHSRHVDGALDGFRTVLESLAFGAARLPVVSTTTGRDAADDLITPAHWLRHARRPVLFSDAVRELADRGVTTFVAVGPSGSLASAAAESAGEDAGTYHAVLRARTGEETAALTALAELHAHGVPVDLAAVLAGGRPVDLPVYAFQHRSYWLAPAVAGAPATVADTGGPAESEPEDLTVAEIVRRRTAALLGVTDPADVDAEATFFALGFDSLAVQRLRNQLASATGLDLPAAVLFDHDTPAALTAFLQDRIEAGQDRIEAGEDDDAPTVLSLLEEMESLDAADIAATPAPERAAIADLLDKLAHTWKDYR

SEQ ID NO: 73 - protein, 7525 aa, Streptomyces hygroscopicus
MARVEPIRPLHELLRIHAERRGDRIAYTDSQRAVTYTQLRLRAGRLAGHLAASGVDRGDRVAMLLGNRIETIEVYLAAARAAAVAVPLNPDAADAELAHFLTDSGATVLVTDETHLDQVRRTGTDATVVLVGRRAPDCVSYEDLAGTEPPCPPRDDLGLDEPAWMLYTSGTTGRPKGVVSAQRSGLWSAMHCDVPSWRLTEDDELLWPAPLFHSLGHHLCLLAVLTVGASARILGGFVARDVLDALAEHSSTVLVGVPTMYRYLLGAVSGEPRARALRVALVAGSTSPASLTRDFEATFGVPLLDTYGCTETTGSLTANTLEDARVPGSCGLPVPGLSLRFVDPVSGADVAPGEEGELWASGPSLMLGYHAQPEATAQVLVDGWYRTGDLARQAETGHVTITGRVKELIIRGGENIHPREIETVAQEVAGVRDAAAAGRPHPVLGDIPVLYVVSDGPRVPAEAILAECRRRLAYFKVPDEIWHVTTIPRTASGKVQRARLAGLPAHLVATGSGEATLCELVWERRDLPGTPSPRRTVVTRRAVGVGPAEIPDADQARLWDEALRRQAAEPGSFVLVDTDGDDDLVPAAASLGEPQIALRAGVAYVPRLVRADTTPLPTAPVGAAPARLRNAPRPRRRPARRPAAPLAAGEVRIDVRAAGLNFRDVLIALGTYPGEGEMGGEAAGIVTEVGPGVDDLAPGDRVFGLVQDAFRRSVVADRRLVARIPRGWSFPIAASVPIVFATAWYGLVDAGELRPGQKVLVHAATGGVGMAATRIARHLGAEVYATASPAKQHLLHADGFDTDHVANSRSAAFADTFPPVDVVLNSLTGELLDASIGLLAPGGRFVEMGKTDIRHAAQQPFDLADVDPARLREILELLLDLFDRGELCPLPVQPWDIRRARDAFAWMSHARHTGKMVLTVPPPIGPDAPVLVTGEDADTVAGLLRDETGLTHVTTAAEEAANPGALVHVLLDGPAGADAHTRPRAAEGLPTVTVRALPGIERPALTGDLIEKAIAGGGSYIVARTGSAGARAATMAGATPPILTALTGPAEPDATEQEWANRLAAARAGREDVLLDLVRDSVATVLGLPGAGHCSPDRTFRENGLDSLTTVEFTNTVAARTGLRVPASTAFDHPTPRAFAAHLAGSATAAPATAQTLGSGDPVAIVGMACRLPGGVASPEDLWRLVAAGTEAITEFPTDRGWDVDALYDPDPDAAGRSTTRHGGFLAGAGFDAAFFGISPNEALAMDPQQRLILETSWEAFENAGIVPDRLRESDTGVFMGAFNQGYGVGRDLGGLGVTATQTSVLSGRLSYVYGLQGPAVTVDTACSSSLVALHQAAQALRAGECSLALVGGVTVMANTAELVEFSRQRGLSPDGRCKAFADAADGTGFAEGVGVLVLERLSDAERNGHTVLAVVRGSAVNQDGASNGLSAPNGVAQQRVIRQALVNAGLRAADVDVVEAHGTGTRLGDPIEAQAVLAAYGQDRDTPLYLGSVKSNIGHAQAAAGVAGVIKMVMAMRHGIAPKTLHVDEPSSHVDWSAGAVELLTEARPWPESDRAPHAGVSSFGVSGTNAHVILEGVPGPSRVESGGDGLVPLPVSARGEVSLRGQVERLEGYLRGGGVDVAAVAQGLVRERAVFGHRAVLLGDARVMGVAVDQPRTVFVFPGQGAQWVGMGVELMDRSAVFAARMEECARALLPHTGWDVREMLSRSDVAERVEVVQPASWAVAVSLAALWQAHGVVPDAVVGHSQGEIAAACVAGALSLEDAARVVALRSRVIAARLAGRGAMASVALPAGEVGLVEGVWIAARNGPASTVVAGDPSAVEEVVARYEADGVRVRRIAVDYASHTPHVEAIEDELAEVLKGISGGTGSVAWWSTVDSAWVTEPVDEGYWYRNLRRPVALDAAVAELDGSVFVECSAHPVLLPAMEQARTVASLRTGDGGWERWLGALAQAWTLGAGVDWGTVVEPVPGRLLDLPTYAFEHRRYWLEAAGATDLSAAGLTGAAHPMLAAVTALPADDGGGVVLTGRISLRTHPWLADHAVRGTVLLPGTAFVELVIRAGDETGCGVVDELVIESPLVVPVTAAVDVSVTVEGADEAGRRPVTVHARTEGTGSWTRHASGTLTPDTPDTSNASGEPFSQWPPATAAAVDVSGFYDELRDAGYEYGSAFQGLRAAWRDGDTVYAEVALPDEQAAEADGFGVHPALLDAALHAGRLDAGGGIELPFSWTGVRLNATGAAAVRVALTRGEAGVAVRVADPDGRPVVSVDSLVLRERADTPSGPNPLRLEWLAVAEAVYDGDLPEGHVLITAAHPDDPEDIPTRAHTRATRVLTALQHHLTTTDHTLIVHTTTDPAGATVTGLTRTAQNEHPHRIRLIETDHPHTPLPLAQLATLDHPHLRLTHHTLHRPHLTPLHTTTPPTTTPLNPEHAIIITGGSGTLAGILARHLNHPHTYLLSRTPPPDTTPGTHLPCDVGDPHQLATTLAHIPQPLTAVFHTAATLDDGILDALTPDRLTTVLHPKANAAWHLHHLTQNQPLTHFVLYSSAAAVLGSPGQGNYAAANAFLDALATHRHTLGQPATSIAWGMWHTTSTLTGQLDDADRQRVRDGFRPLTEAEGTHFIDASLAADVPFMVAAIPTEPVRQRTERRIAARAEDNRDRDRDRDRDLLAIVCAATAAVLGHADASEITPTTAFKDLGIDSLSGVRLRNSLAETTGVRLSATAVFDHPTPAALAARLDEERRGEPAPAAPAATVPAPTVAGNEPLAIVAMACRMPGGVRSPEDLWRLVDSGGDAITEFPADRGWDLAALYDPNPDAVGKVSVRHGGFLTGAADFDAAFFGISPREALAMDPQQRLVLEASWEAFERAGILPESVRGSDTGVFMGAFTQGYGAGVDLGGFGATGTPTSVLSGRLSYYFGLEGPSVTVDTACSSSLVALHQAARSLRSGECSLALVGGVTVMATTTGFVEFSRQRGLAPDGRAKAFADTADGTSFAEGAGVLVLERLSDATRHGHPVLALVRGSAVNSDGASNGLSAPNGPAQQRVIQRALADAGLAPGDVDAVEAHGTGTRLGDPVEAQALQVAYGRERVHPLLIGSLKSNIGHTQAAAGVAGVIKMVMAMRHGVLPRTLHVDEPSRHVDWDGDIRLLHRSEPWPVTGRARRAGVSSFGISGTNAHVVLEAGPPAAPAPVSAPEAEPVPEDVVWPMSARTPEGLRDVAGQLAPLTGAAAAVGHSLATTRTAMRHRAVVPAREAEAFARGAEVPGAVTGTADVTDTRVVFAFPGQGSQWAGMGAELLATEPVFARRLRECATALAPHTGWDLLDVIAQRPGAPAFDRVDVVQPASFAVMVALAELWRAHGVAPAAVVGHSQGEVAAACVAGVLTLDDAAKVVAVRSRLVATELAGQGGMVSVPPADFDAAVWAGRLEVAAVNGPASIVVAGAADAVEELLAATPRARRIAVDYASHTAHVETIRGALLDALAGITPRTPDVPFFSTVDEAWLDRPADAAYWYDNLRRTVRFAAATGHLADRGYRAFVEVSAHPVLTTALEDTLAGHAHTVVTGTLRRGEGGLDRFTRSLAALWVRGVPVTWSFATRRVVPLPTYPFRRDRYWIDAEPAGTSGHPLLGSWVDLARRRGRAGHRGVSVRRQPWLADHEVDGRVIVPGSALVELLAEAGARLGTPEIAELTIVAPVVVDGDGDTEIQATVGTEVSGRRSVSLHSRTGTGPWALSATGALSVDTGGPAEPVDWPPADADPADLTGFYDALPLSYGPAFRAMTAMWTGEGRAYASVRLAEQLTDARYGLHPVLLDAALHALGTVFTDPERRRLAFSWSGVRIHARAATALRVLLERVGPDMVRIVATDEHGSPVLDVDSLTVRAADPDAEALFEIAWVPVPASPVPDWTYLADVPDGEHPPVVVLAVEPGDPGTSPGARTRELGRDLLTTVQTWLAEPRWARSRLIVATRTGDPAQEALGGLVRTAETEHPGRVALIEADEITPAAIAAGLAAGDEPHVRVADGTARAARLRRVAAATGTSPLTGGTVLVTGGTGGLGRLLVDHLLTVHEAAEVVVVSRNGRPGDTPEDDRVRYVAADVVDRDELAAVVADVAQRLRAVVHMAGIVDDAAVTTMRPEQWDAVLRVKADVAWHLHELTRDLDLAAFVLYSSISATFGGAGQANYATGNAFLDALARHRHHQGLPAVSLAWGLWDAADGMGGRLTATDLARIARNGMTPMTAAQGLALFDAALHTDRPALVPIRLDLAAVAASDRVPPVLRTLVPAVRRTSAPPAARDMLDLVRTSAAAVLGHRDAHAIAPARAFREVGFDSLTGVELRNRLADATGLTLPATLVFDHPTAQALAAHLDELAGARATTRRRTPTAAVRQDEPLAIVGMACRLPGGVASPEDLWRLLESGGDGITAFPTDRGWDVDGLYDPDPDHPGTSTVRHGGFLAGVADFDAAFFGISPREALAMDPQQRLVLETSWEALEHAGILPESLRGSDTGVFMGGYFYGYGTGADRGGFGATSTQTSVLSGRLSYFYGLEGPAVTVDTACSSSLVALHQAGQSLRSGECSLAVVGGVTVMASPSGFVDFSQQRGLSPDGRCKAFADAADGTGFAEGSGVLIVERLSDAERHGHNVLAVVRGSAVNQDGASNGLSAPNGPSQERVIRQALANAGLTPADVDAVEAHGTGTRLGDPIEAQAVLATYGQHRDTPVLLGSLKSNIGHTQAAAGVAGVIKMVLAMRHGTLPRTLHVDTPSSHVDWTAGAVELLTDARPWPETDRPRRAGVSSFGVSGTNAHIILESHPRPAPEPAPAPDTGPLPLLLSARTPQALDAQVHRLRAHLATGEEDERAVAAALLARTAFPHRAALIGTDTVTGAAEPDRRLVWLFSGQGSQRPGMGDGLAAAYDVFARTRREVLDALDVPAGLDLHDTGYAQPAVFALQVALGAQLEAWGVRPDAFVGHSIGELAAAYVAGVWSLEDACRLVSARARLMQALPSGGAMAAVIASERDALPLLRDGVEIAAVNGPASIVLSGDEEAVLDVAARLGRFTRLRTSHAFHSARMEPMLEEFRKVAESLTYHEPRIPMAAGAACTTPEYWVRQVRDTVRFGEQVAAHDGAVLLEIGPDRSLTRLVDGIPMLHADDEPRSALTALARLHTDGVTVDWPKVIDPAPARASHPPTYPFERVRYWLGTQTAGDAAPAGQTPVAHPALTAAVTLPGTGDLVLTGRVDAADPLAHSLHGLAVLPAAALLDLAIRAGDEAGCGALDTFTVDTPLTLPRSGALALSVTVSAPGADGRRAVTVHTRHAAGEWTEHAHGILAPDPRTAPAVREMPSTWPPATARPVDPDDIADRLARAGYTDGPALPRPRAVWADDDAVWAEVALADGQLADAGRYGLHPALLGAALRLAAEGDHLPYAFDDVRVHATGATAVRVAVTADGVHLADETGGPVATIGAVRRRPLTITGAVPGLLRPVLAELPELPPTTATTGRLDDPTVPDVVILPAHGGGGAPLDDTRELGAGVLTAVQRFLTDDRYADAVLAVHTGPGLASAAAAGLVRTAQAEHPGRIVLVDAAPDTAEPLLAAATALDEPQVVLRDGQVYARRLAPAVPAGDAPALDPDGTVLVTGGSGTLAGIISRHLVERHGVRRLLMLSRSGTASDVPGAEVTAIACDVADRDELASVLAGIDPAHPLTAVVHTAAVLDDGVLTALTPDRLETVLRPKVDAAWHLHELTQDTELAAFVLYSSAAGVLGSPGQGNYAAANAFLDALAEQRRAAGLPALSVAWGLWEPESGLTVGTGARMRRDGVTALTAEGGLTLFDAALRSSDPALVAADPAGLGSSPLLRAPRREPRRRAAGATTLADRIARLSAADAEKDVLAVVRQCTAAVLGHDGAARVEATATFKELGVDSLMAIRLRNAFTEATGVRLPATAVFDFPTPRAVAAKLTAALSGRTASPTRTTTAAVRQDEPLAIVGMACRLPGGVASPEDLWRLLESGGDGITAFPTDRGWDVDGLYDPDPDHPGTSTVRHGGFLAGVADFDAAFFGISPREALAMDPQQRLVLETSWEALEHAGILPESLRGSDTGVFMGAFSDGYGLGTDLGGFGATGTQTSVLSGRLSYFYGLEGPAVTVDTACSSSLVALHQAGQSLRSGECSLALVGGVTVMASPSGFVEFSQQRGLAPDARCKAFADAADGTGFAEGSGVLIVERLSDAERNGHRVLAVVRGSAVNQDGASNGLSAPNGPSQERVIRQALANAGLTPADVDAVEAHGTGTRLGDPIEAQAVLATYGQGRDTPVLLGSLKSNIGHTQAAAGVAGVIKMVLAMRHGTLPRTLHVDTPSSHVDWTAGAVELLTDARPWPETDRPRRAGVSSFGVSGTNAHVLLEAHPAGEPPAEEPSASKPGEPLIATPLTPLPVSARTATALDGQVRRLREHLAARPGHDPRAIAAGLLARRTTFPHRAVLLDDDVVTGTALTEPRTVFVFPGQGPQWRGMGVELMAASPVFAARMRQCADALIPHTGWDPIAMLDDPEVTRRVDVVHPVCWAVMVSLAAVWEAAGVRPDAVIGHSQGEIAAACVAGALTLEDGARLVALRSALLLRELAGRGAMGSVALPAADVEADAARIDGVWVAGRNGATTTTVAGRPDAVETLIADYEARGVWVRRIAVDCPTHTPFVDPLYDELQRIVADTTSRTPEIPWFSTADERWIDAPLDDEYWFRNMRHPVGFATAVTAAREPGDTVFVEVSAHPVLLPAIDGATVATLRRGGGVHRLLTALAEAHTTGVPVDWAAVVPATATAHDLPTYAFHHERYWIETAAGTDASGLGLDAVDHPLLAASVALPDSDEVLLTGRFSLATHPWLAGHSVDGAVLLPGPAFLELAGRGADEAGCDLLDELVVETPLVLPATGAVQVRVTVAAPDDTGRRAVRVHARTDGDRTWTRHASGFAGIATTEPATTPGPWPPEHAEPVDVAAFYQRLDDAGYEFGPEFRGMSAAWSHGDTVCAEVALDGALARDAARYTLHPALLVTALQAGSIGAAAENAGVRLPFAFTGVRVHTSGATKLRVTFVHGEGEGGARVHLADELGRPVAQIGSLITRPPATTGPDGDVRLFRRTWTGVRAPAAPGTTARRYTDLGDDATPDVIVVPVSGPDEVRTALDDPRTAGATLVVSAEAGPVAGAVAALLDTAEPGRLVLVETTDTVTPRRAAALSRLDEPHLRLADGRLEAPRLVPAAPTTAAASYGDTVLLAGGSEELAGHLGGHGAEVIRYEPGTVPETPVTAVVHADGTAESAWELHRLTRDLDLTAFVLAVPSGEAAGPLQALADLRRAQGLPAVAFTAAADRLTDLLDAACATGEAVVVATAPPGPGDPSPLWRPIQRPTRRSATDGGSLLERLPDLPHKEREQVLLGVVRDTAATLLGHTDAAAVTATTAFKDLGVDSLTALGLRNRLSEALGIPLPATLVFDYPAAGALTRHLLTLLAPDVNGTPDDNGTPDGGEPPAQAPASTTTAEPDDELFDDMDADALIAHVLKG

SEQ ID NO: 74 - protein, 3591 aa, Streptomyces hygroscopicus
MAENDLIEALRTSVKDNAQLRRENTALRAAANEPLAVVGMACRLPGGVTSPEELWQLVADGRDAIGDFPTDRGWDVAALHAAAESATGRAGALAGAADFDAAFFGISPREATALDPQQRILLEIAWEALEHAGIVPDTLRGSDTGVFVGGFYYGYGTGADLGGFGAYSTQPAVLAGRLSYFFGMEGPAVTVDTACSSSLVALHQAGQALRTGECSLALVGGVTVMASPQTFVEFSRQGGVAPDGRCKAFADAADGTGFAEGAGVLVVEKLSDAERNGHTVLAVVRSSAVNQDGASNGISAPNGPSQQRVIRQALHKAGLAPADVDVVEAHGTGTTLGDPIEAHAILATYGQEREVPLLLGSLKSNIGHAQAAAGVAGVIKMVMAMRYGIAPKTLHVDEPSSHVDWTEGAVELLTEARAWPDAGRPRRAGVSAFGVSGTNAHVILEGVPGPSRGESAVDGLVPLPVSARSEVSLRGQVERLEGYLRGGGVDVAAVAQGLVRERAVFGHRAVLLGDARVMGVAVDQPRTVFVFPGQGAQWVGMGVELMACSAVFAARMEECARALLPHTGWDVREMLARPDVAERVEVVQPASWAVAVSLAALWQAHGVVPDAVVGHSQGEIAAACVAGALSLEDAARVVALRSQVIAGRLAGRGAMASVALPAGEVDLVEGVWIAARNGPSSTVVAGDPSAVEEVVTRYEAEGVRVRRIAVDYASHTPHVEAIEDELAEVLEGISGGTGSVAWWSTVDSAWVTEPVDEGYWYRNLRRPVALDAAVAELDGSVFVECSAHPVLLPAMEQAHTVASLRTGDGGWERWLTALAQAWTLGTAVDWDTVVEPVPGRLLDLPTYAFEHRRYWLEAAGATDLSAAGLTGAAHPMLAAVTALPADDGGGVVLTGRISLRTHPWLADHAVRGTVLLPGTAFVELVIRAGDETGCGVVDELVIETPLVVPVTGAVDVSVTVEGADEAGRRRVTVHARTEGTDSWTRHASGTLGRAGSVAAVPPPAWPPPGARRVDVSAFYERLAETGYSYGPAFQGLRTAWRDGETLYAEVEIAGEQADDTPHYGVHPALFDAALHVTCLPLLAEQEAEVRLPFSWSGVRFHTTGATTLRVTITQGPDGAAVHATDPVGQPVVTVAALTARPVNVDGDAAVVRNSLYGLSWTELPTPGPGPADAVHIVSALPEPGADVLDETYRLTEFVLGELHRVIAEDGPAETTLVVRIDAGPVGGAVAGLVRSAQAEHPGRFVLVETGTDTPIEALAAATTLAEPYVRVTDGRYEAPRFTRTAAAETPEPLLDPDGTVVITGGSGVLAGLLARHLVAEHGARHLLLLSRSEPPADTPGVHIRCDVADRDQLAAALAAAGRPLTAVFHTAAVLDDGVTTALTPERLATTLRPKADGAWHLHELTRDADLRSFVLYSSVAGIMGGRGQGNYSAANGFLDGLATLRHAEGLPALSLAWGLWADDSGLTGSMSGTNRTRVRRGGFRPMSAGVGMRLLEAAAGTGTAFAVAATMDLTAHTSPLFADLRRAVSRPAAATAVPLADRLGTMSGAERDTALLALVRDNAAAVLGHADAADVSADAAFKELGIDSLTAVELRNRLAAATGVRLPATLVFDYPTPRAIASRLDEALVGGAAPVAVPTAAATRDEPLAIVGMACRLPGGVTSPDDLWRMVDSGGDAVTGFPADRGWDPSGLTGGSDTDRGGFLSDAAGFDAAFFGISPREARAMDPQQRILLETTWEAFESAGIVPGTLRGSDTGVFMGAFSYGYGVGADLDGFGSIGMQPSVLTGRISYFYGLQGPAFTVDTACSSSLVALHQAGHALRHGECSLALVGGVTVMATPTGFVEFQQQGGLSPDGRCRAFADAANGTGWAEGAGVLVLERLSDAERNGHTVLAVVRGSAVNQDGASNGLSAPNGPSQQRVIQQALVNAGLRAADVDVVEAHGTGTTLGDPIEAQAILATYGQEREVPLLLGSLKSNIGHAQAAAGVAGVIKMVMAMRYGIAPKTLHVDEPSSHVDWSAGAVELLTEARPWPESDRAPHAGVSSFGVSGTNAHVILEGVPGPSRGESVVDGLVPLPVSARGEVSLRGQVERLEGYLRGGGVDVAAVAQGLVRERAVFGHRAVLLGDARVTGVAVDQPRTVFVFPGQGAQWVGMGVELMAHSAVFAARMEECAQALLPHTGWDVREMLARPDVAERVEVVQPASWAVAVSLAALWQAHGVVPDAVIGHSQGEIAAACVAGALSLEDAARVVALRSQVIAARLAGRGAMASVALPAGEVGLVEGVWIAARNGPASTVVAGDPSAVEEVVARYEAEGVRVRRIAVDYASHTPHVEAIEDELAKVLEGVAGKAASVAWWSTVDSAWVTEPVDEGYWYRNLRRPVALDAAVAELDGSVFVECSAHPVLLPAMEQAHTVASLRTGDGGWERWLTALAQAWTLGTAVDWDTVVEPVPGRLLDLPTYAFEHRRYWLEAAGATDLSAAGLTGAAHPMLAAVTALPADDGGVVLTGRISLRTHPWLADHAVRGTVLLPGTAFVELVIRAGDETGCGIVDELVIESPLVVPVTAAVDVSVTVEGADEAGRRPVTVHARTEGTGSWTRHASGTLTPDTPDTPGVVGVEPFSQWPPVTAVAVDVSGFYDELRDAGYEYGSAFQGLRAAWRDGDTVYAEVALPDEQAAEADGFGVHPALLDAALHAVALTTPDDSAAGLPFAWKGARFVATGSAMLRAVITRDGDELSLRVADSAGQLVAEIRTVRTRPLSPPVGTGLMRLTWIEVAAPTDVPATDVDVITLPAADGDDPVAETRALTTRLLTALTGSGGDLLVHTTAGLATGAAAGLLRAAQAEQPGRFVHVETESGVTLAPEQQRIAVALGEPRLRLRGGRFEAARLTRVPEPLTVPDSDTWLIRPARTGTLDGLTAADSAEPRRPLAPAEVRIGVRAAGLNFRDVLIALGTYPGQGVLGGEAAGIVLETGADVSGLAPGDRVFGLVGTGFGPTVIADHRMLGRMPDGWTFPQAASVMTAFATAWYGLVDLAGLRPGEKVLIHAATGGVGSAARQIARHLGAEVYATTSAAKRHLVDLDGAHLADSRSTAFADAFPPVDVVLNSLTGELLDASVGLLAPGGRFIEMGKTDIRHAVQRPFDLMDAGPDRLKEIIAELLGLFARGVLHPLPVTVHDMRQVREALATMSRGEHTGKIVLTVPRPLDPEGAVVITGGSGTLAGILARHLNHPHTYLLSRTPPPDTTPGTHLPCDVGDPHQLATTLAHIPQPLTAVFHTAGTLDDALLDNLTPDRIDTVLKPKADAAWHLHRLTRDTDLAAFVVYSSAAGVLGTPGQGNYAAANAFLDALAEHRRAQGLPGLSIAWGLWDQASGLTADLTDADRRRMRKGGASALTAEQGMRMYDAAVHTGTGSVVAVAGDLPPDLPLLRGRPKPSARRSARNEQERPTDLLALVRQKAAAVLGHADPEDIPEDAAFRELGVDSLIAVQLRNGLNEATGLRLSATLVFDYPSPRALADRIGELLSPDDPVTVVLAQLDRLEALVAGVDPGARQADAIGTRLDALLNRWRRETRPTTPAGVLSADATADEIFDLIDRELR
